(19) United States
(12) Patent Application Publication
(10) Pub. No.: US 2021/0292422 A1
(43) Pub. Date: Sep. 23, 2021

(54) MULTI-SPECIFIC WNT SURROGATE MOLECULES AND USES THEREOF

(71) Applicant: Surrozen, Inc., South San Francisco, CA (US)

(72) Inventor: Yang LI, Mountain View, CA (US)

(21) Appl. No.: 17/257,817

(22) PCT Filed: Jul. 5, 2019
(86) PCT No.: PCT/US2019/040687

§ 371 Date: Jan. 4, 2021

Related U.S. Application Data
(60) Provisional application No. 62/694,339, filed on Jul. 5, 2018.
(60) Provisional application No. 62/782,122, filed on Dec. 19, 2018.
(60) Provisional application No. 62/797,772, filed on Jan. 28, 2019.

(51) Int. Cl. C07K 16/28

(52) U.S. Cl. CPC C07K 16/2863; C07K 2317/31; C07K 2317/35; C07K 2317/524; C07K 2317/526; C07K 2319/21; C07K 2317/622; C07K 2317/64; C07K 2317/71; C07K 2317/75; C07K 2317/92; C07K 2317/55

(57) ABSTRACT

The present disclosure provides Wnt pathway agonists and related compositions, which may be used in any of a variety of therapeutic methods for the treatment of diseases.

### CROSS REFERENCE TO RELATED APPLICATIONS

[0001] This application claims priority to U.S. Provisional Application No. 62/694,339, filed on Jul. 5, 2018, U.S. Provisional Application No. 62/782,122, filed on Dec. 19, 2018, and U.S. Provisional Application No. 62/797,772, filed on Jan. 28, 2019, each of which is incorporated by reference herein in its entirety.

### STATEMENT REGARDING SEQUENCE LISTING

[0002] The Sequence Listing associated with this application is provided in text format in lieu of a paper copy, and is hereby incorporated by reference into the specification. The name of the text file containing the Sequence Listing is SRZN_008_03WO_ST25.txt. The text file is 878 KB, was created on Jul. 5, 2019, and is being submitted electronically via EFS-Web.

### BACKGROUND

### Technical Field

[0003] The present disclosure relates generally to Wnt signaling pathway agonist molecules, compositions, and methods of using the same. Such molecules are useful, for example, in modulating Wnt signaling pathways.

### Description of the Related Art

[0004] Wnt (“Wingless-related integration site” or “Wingless and Int-1” or “Wingless-Int”) ligands and their signals play key roles in the control of development, homeostasis and regeneration of many essential organs and tissues, including bone, liver, skin, stomach, intestine, kidney, central nervous system, mammary gland, taste bud, ovary, cochlea and many other tissues (reviewed, e.g., by Clevers, Loh, and Nusse, 2014; 346:1248012). Modulation of Wnt signaling pathways has potential for treatment of degenerative diseases and tissue injuries.

[0005] One of the challenges for modulating Wnt signaling as a therapeutic is the existence of multiple Wnt ligands and Wnt receptors, Frizzled 1-10 (Fzd1-10), with many tissues expressing multiple and overlapping Fzds. Canonical Wnt signals also involve Low-density lipoprotein (LDL) receptor-related protein 5 (LRP5) or Low-density lipoprotein (LDL) receptor-related protein 6 (LRP6) as co-receptors, which are broadly expressed in various tissues, in addition to Fzds. Ratios of Fzd to LRP binding moieties have not been previously explored to modulate signaling levels, and to confer tissue and/or functional specificity.

[0006] The Wnt signaling pathway is subdivided into canonical (β-catenin dependent) and non-canonical (β-catenin independent) pathways. The non-canonical pathway can be further divided into two distinct branches—the Planar Cell Polarity (PCP) pathway and the Wnt/Ca²⁺ pathway. Binding of certain Wnt ligands with certain Fzd receptors, or combinations of Fzd receptors can trigger the different pathways, and/or confer tissue and functional specificity.

[0007] Accordingly, there is clearly a need in the art for binding moieties that specifically bind to one or more Fzd, LRP5, or LRP6 to modulate the different Wnt signaling pathways. Also a need exists to create binding moieties with certain ratios of co-receptors (e.g., Fzd and LRP receptors) to modulate signaling levels, and to confer tissue and/or functional specificity. The present disclosure addresses these needs.

### BRIEF SUMMARY

[0008] In various embodiments, the present disclosure provides Wnt surrogate molecules and related uses thereof.

[0009] In one aspect, the present disclosure provides a multispecific Wnt surrogate molecule, wherein the Wnt surrogate molecule comprises: (i) a plurality of regions that each specifically bind to a set of one or more Fzd receptor epitopes (Fzd binding regions), wherein at least two Fzd binding regions bind to the same or different sets of one or more Fzd receptor epitopes; and (ii) one or more regions that specifically bind to a Low-density lipoprotein (LDL) receptor-related protein 5 (LRP5) and/or a LDL receptor-related protein 6 (LRP6) (LRP5/6 binding regions).

[0010] In some embodiments, at least two Fzd binding regions bind to different sets of one or more Fzd receptors, different sets of one or more epitopes within the same set of one or more Fzd receptors, or a combination thereof.

[0011] In some embodiments, each Fzd binding region binds to one or more of Frizzled 1 (Fzd1), Frizzled 2 (Fzd2), Frizzled 3 (Fzd3), Frizzled 4 (Fzd4), Frizzled 5 (Fzd5), Frizzled 6 (Fzd6), Frizzled 7 (Fzd7), Frizzled 8 (Fzd8), Frizzled 9 (Fzd9), and Frizzled 10 (Fzd10).

[0012] In some embodiments, at least one Fzd binding region binds to: (i) Fzd1, Fzd2, Fzd7, and Fzd9; (ii) Fzd1, Fzd2, and Fzd7; (iii) Fzd5 and Fzd8; (iv) Fzd5, Fzd7, and Fzd8; (v) Fzd1, Fzd4, Fzd5, and Fzd8; (vi) Fzd1, Fzd2, Fzd5, Fzd7, and Fzd8; (vii) Fzd4 and Fzd9; (viii) Fzd9 and Fzd10; (ix) Fzd5, Fzd8, and Fzd10; (x) Fzd4, Fzd5, and Fzd8; or (xi) Fzd1, Fzd5, Fzd7, and Fzd8.

[0013] In some embodiments, the plurality of Fzd binding regions comprises: (i) a first Fzd binding region that binds to a first set of one or more Fzd receptors, and (ii) a second Fzd binding region that binds to a second, different set of one or more Fzd receptors. In some embodiments, the first Fzd binding region binds to one or more of Fzd1, Fzd2, Fzd3, Fzd4, Fzd5, Fzd6, Fzd7, Fzd8, Fzd9, and Fzd10, and the second Fzd binding region binds to one or more of Fzd1, Fzd2, Fzd3, Fzd4, Fzd5, Fzd6, Fzd7, Fzd8, Fzd9, and Fzd10. In some embodiments, the first Fzd binding region binds to Fzd4 and the second Fzd binding region binds to Fzd9.

[0014] In some embodiments, the plurality of Fzd binding regions comprises: (i) a first Fzd binding region that binds to a first set of one or more epitopes within a set of one or more Fzd receptors, and (ii) a second Fzd binding region that binds to a second, different set of one or more epitopes within the same set of one or more Fzd receptors.

[0015] In some embodiments, the Wnt surrogate binds to at least one Fzd receptor that induces non-canonical Wnt signaling; and the second Fzd binding region binds to at least one Fzd receptor that induces canonical Wnt signaling. In a further embodiment, the Wnt surrogate binding to the first Fzd receptor and second Fzd receptor results in canonical Wnt signaling; or non-canonical Wnt signaling.

[0016] In some embodiments, at least one Fzd binding region binds monospecifically to a single Fzd receptor. In some embodiments, the at least one Fzd binding region binds monospecifically to Fzd1, Fzd2, Fzd3, Fzd4, Fzd5, Fzd6, Fzd7, Fzd8, Fzd9, or Fzd10.

[0017] In some embodiments, at least one Fzd binding region binds to a region of a Fzd receptor that (i) does not include the cysteine rich domain (CRD) of the Fzd receptor or (ii) includes less than the entire CRD of the FZD receptor or iii) partially overlap with the CRD of the FZD receptor.

[0018] In some embodiments, the at least one Fzd binding region binds to a hinge region of the Fzd receptor. In some embodiments, the hinge region comprises an amino acid sequence having at least 90% identity, at least 95% identity, or at least 98% identity to any of the sequences set forth in SEQ ID NO:98-107.

[0019] In some embodiments, the at least one Fzd binding region binds to an N-terminal region upstream of the CRD of the Fzd receptor. In some embodiments, the N-terminal region comprises an amino acid sequence having at least 90% identity, at least 95% identity, or at least 98% identity to SEQ ID NO:108.

[0020] In some embodiments, at least one of the Fzd binding regions comprises one or more antigen-binding fragments of an antibody. In some embodiments, the one or more antigen-binding fragments are selected from the group consisting of: IgG, scFv, Fab, and VHH or sdAbs. In some embodiments, the one or more antigen-binding fragments are humanized.

[0021] In some embodiments, at least one Fzd binding region comprises an amino acid sequence having at least 90% identity to any of the sequences set forth in Table 1A, Table 1B, SEQ ID NOs: 1-73, or an antigen-binding fragment thereof.

[0022] In some embodiments, the one or more LRP5/6 binding regions comprises one or more antigen-binding fragments of an antibody. In some embodiments, the one or more antigen-binding fragments are selected from the group consisting of: IgG, scFv, Fab, and VHH or sdAbs. In some embodiments, the one or more antigen-binding fragments are humanized.

[0023] In some embodiments, the one or more LRP5/6 binding regions comprise an amino acid sequence having at least 90% identity to any of the sequences set forth in Table 2A, Table 2B, or SEQ ID NOs: 74-97, or an antigen-binding fragment thereof.

[0024] In some embodiments, the Wnt surrogate molecule comprises two or more LRP5/6 binding regions.

[0025] In some embodiments, the Fzd binding regions and the LRP5/6 binding regions are in a ratio of Fzd:LRP5/6.

[0026] In some embodiments, the Fzd binding regions and the LRP5/6 binding regions are in a ratio of Fzdₙ:LRP5/6ₙ (Fₙ:Lₙ), wherein F and L are integers between 1 and 9, inclusive, and n is an integer between 1 and 4 inclusive.

[0027] In some embodiments, the Fzd binding regions and the LRP5/6 binding regions are in a ratio of Fzd:LRP5/6 selected from the group consisting of: 1:1, 2:1, 3:1, 4:1, 5:1, 6:1, 2:1 2:3, 2:5, 2:7, 7:2, 5:2, 3:2, 3:4, 3:5, 3:7, 3:8, 8:3, 7:3, 5:3, 4:3, 4:5, 4:7, 4:9, 9:4, 7:4, 5:4, 6:7, 7:6, 1:2, 1:3, 1:4, 1:5, 1:6, 2:1 (with two Fzd binders and one LRP binder), 1:2 (with one Fzd binder and two LRP binders), 2:1:1 (with two different LRP binders), 1:1:2 (with two different Fzd binders), 1:1:1 (two different Fzd binders and one LRP binder or one Fzd binder and two different LRP binders) and 1:1:1:1 (all different Fzd and LRP binders).

[0028] In some embodiments, the ratio of Fzd binding regions to LRP5/6 binding regions (Fzd:LRP5/6) comprises 2 Fzd binding regions and 2 LRP5/6 binding regions; 2 Fzd binding regions and 1 LRP5/6 binding region; or 1 Fzd binding region and 2 LRP5/6 binding regions.

[0029] In some embodiments, the ratio of Fzd binding regions to LRP5/6 binding regions (Fzd:LRP5/6) comprises a first Fzd binding region, a second Fzd binding region, and 1 LRP5/6 binding region; or a first Fzd binding regions, a second Fzd binding regions, a first LRP5/6 binding region, and a second LRP5/6 binding region. In further embodiments, the first Fzd and second Fzd binding regions bind to different Fzd receptors, or bind to the same Fzd receptor on different regions/epitope, and the first LRP5/6 and second LRP5/6 binding regions bind to different epitopes or to different LRP proteins.

[0030] In some embodiments, the LRP binding regions comprise a first LRP binding region that binds to a first set of one or more LRP receptors, and a second LRP binding region that binds to a second, different set of one or more LRP receptors.

[0031] In some embodiments, the Wnt surrogate molecule comprises a structural format selected from the group consisting of: hetero-Ig, diabody (DART), tandem diabody (DART), diabody-Fc, Fabs-in-tandem, Fabs-in-tandem IgG (FIT-Ig), Fv-IgG, and tandem scFv.

[0032] In some embodiments, the Wnt surrogate molecule comprises: (i) a first light chain and a first heavy chain forming a first Fzd binding region, and (ii) a second light chain and a second heavy chain forming a second Fzd binding region, wherein the first and second Fzd binding regions bind to different sets of one or more Fzd receptor epitopes.

[0033] In some embodiments, the Wnt surrogate molecule comprises a first LRP5/6 binding region fused to an N-terminus of the first light chain, a C-terminus of the first light chain, an N-terminus of the first heavy chain, or a C-terminus of the first heavy chain. In some embodiments, the Wnt surrogate molecule comprises second LRP5/6 binding region fused to an N-terminus of the second light chain, a C-terminus of the second light chain, an N-terminus of the second heavy chain, or a C-terminus of the second heavy chain.

[0034] In some embodiments, the first and second heavy chains are connected to each other. In some embodiments, the first heavy chain comprises a first CH3 domain, the second heavy chain comprises a second CH3 domain, and the first and second CH3 domains are connected to each other. In some embodiments, the first and second CH3 domains are connected to each other via knobs-into-holes mutations. In some embodiments, the first heavy chain and/or the second heavy chain comprise an amino acid sequence having at least 90% identity, at least 95% identity, or at least 98% identity to any of the sequences set forth in SEQ ID NOs:110, 112, 114, 116, 118, 120, or 122 (or shown in Table 5 or Table 6A), and (ii) the first light chain and/or the second light chain comprise an amino acid sequence having at least 90% identity to any of the sequences set forth in SEQ ID NOs:109, 111, 113, 115, 117, 119, or 121 (or shown in Table 5 or Table 6A). In some embodiments, the Wnt surrogate molecule comprises one or more sequences (e.g., two or three sequences) having at least 90%, at least 95%, at least 98% or at least 99% sequence identity to a sequence disclosed in Table 5 or Table 6A. In particular embodiments, the Wnt surrogate molecule comprises the sequences set forth for any Wnt surrogate molecule disclosed in Table 5 or Table 6A, or sequences having at least 90%, at least 95%, at least 98%, or at least 99% identity to such sequences.

[0035] In another aspect, the Wnt surrogate molecule has a structure as set forth in Table 6B.

[0036] In some embodiments, the Wnt surrogate molecule modulates a Wnt signaling pathway in a cell, optionally a mammalian cell. In some embodiments, the Wnt surrogate molecule increases signaling via the Wnt signaling pathway in the cell. In some embodiments, the Wnt signaling pathway is a canonical Wnt signaling pathway. In some embodiments, the Wnt signaling pathway is a non-canonical Wnt signaling pathway.

[0037] In another aspect, the present disclosure provides a pharmaceutical composition comprising a pharmaceutically acceptable excipient, diluent, or carrier, and a Wnt surrogate molecule according to any of the embodiments herein.

[0038] In another aspect, the present disclosure provides a method for agonizing a Wnt signaling pathway in a cell, comprising contacting the cell with a Wnt surrogate molecule according to any of the embodiments herein, wherein the Wnt surrogate molecule is an agonist of a Wnt signaling pathway.

[0039] In another aspect, the present disclosure provides a method for treating a subject having a disease or disorder, comprising administering to the subject an effective amount of a pharmaceutical composition of any of the embodiments herein, wherein the Wnt surrogate molecule is an agonist of a Wnt signaling pathway.

[0040] In some embodiments, the disease or disorder is associated with reduced or impaired Wnt signaling, and/or wherein the subject would benefit from increased Wnt signaling. In some embodiments, the disease or disorder is selected from the group consisting of: bone fractures, stress fractures, vertebral compression fractures, osteoporosis, osteoporotic fractures, non-union fractures, delayed union fractures, spinal fusion, pre-operative optimization for spine surgeries, osteonecrosis, osseointegration of implants or orthopedic devices, osteogenesis imperfecta, bone grafts, tendon repair, tendon-bone integration, tooth growth and regeneration, maxillofacial surgery, dental implantation, periodontal diseases, maxillofacial reconstruction, osteonecrosis of the jaw, hip or femoral head, avascular necrosis, alopecia, hearing loss, vestibular hypofunction, macular degeneration, age-related macular degeneration (AMD), vitreoretinopathy, retinopathy, diabetic retinopathy, diseases of retinal degeneration, Fuchs' dystrophy, cornea diseases, stroke, traumatic brain injury, Alzheimer's disease, multiple sclerosis, muscular dystrophy, muscle atrophy caused by sarcopenia or chachexia, diseases affecting blood brain barrier (BBB), spinal cord injuries, spinal cord diseases, oral mucositis, short bowel syndrome, inflammatory bowel diseases (IBD), metabolic syndrome, diabetes, dyslipidemia, pancreatitis, exocrine pancreatic insufficiency, wound healing, diabetic foot ulcers, pressure sores, venous leg ulcers, epidermolysis bullosa, dermal hypoplasia, myocardial infarction, coronary artery disease, heart failure, hematopoietic cell disorders, immunodeficiencies, graft versus host diseases, acute kidney injuries, chronic kidney diseases, chronic obstructive pulmonary diseases (COPD), idiopathic pulmonary fibrosis, acute liver failure of all causes, acute liver failure drug-induced, alcoholic liver diseases, chronic liver failure of all causes, cirrhosis, liver fibrosis of all causes, portal hypertension, chronic liver insufficiency of all causes, nonalcoholic steatohepatitis (NASH), nonalcoholic fatty liver disease (NAFLD) (fatty liver), alcoholic hepatitis, hepatitis C virus-induced liver diseases (HCV), hepatitis B virus-induced liver diseases (HBV), other viral hepatitis (e.g., hepatitis A virus-induced liver diseases (HAV) and hepatitis D virus-induced liver diseases (HDV)), primary biliary cirrhosis, autoimmune hepatitis, livery surgery, liver injury, liver transplantation, “small for size” syndrome in liver surgery and transplantation, congenital liver disease and disorders, any other liver disorder or defect resulting from genetic diseases, degeneration, aging, drugs, and injuries.

[0041] In some embodiments, the disease or disorder is a bone disease or disorder. In some embodiments, the Wnt surrogate molecule binds: (i) Fzd1, Fzd2, and Fzd7; or (ii) Fzd1, Fzd2, Fzd5, Fzd7, and Fzd8.

### BRIEF DESCRIPTION OF THE DRAWINGS

[0042] The patent or application file contains at least one drawing executed in color. Copies of this patent or patent application publication with color drawing(s) will be provided by the Office upon request and payment of the necessary fee.

[0043] FIG. 1. Schematic diagrams of illustrative formats of Wnt surrogate molecules. Different VHH, Fv, or scFv, Diabody, or Fabs containing various VL and VH regions directed against different Fzd receptors and Lrp receptors are combined in various ratios. The different colors represent different binders (which can bind to the same target or different targets).

[0044] FIG. 2A. Schematic diagram of a Fzd receptor including a cysteine rich domain (CRD), hinge region, and N-terminal region.

[0045] FIG. 2B. Schematic diagram of a Wnt surrogate molecule with binding specificity for the Fzd receptor hinge region.

[0046] FIG. 2C. Binding kinetics of 1791-3 and 1291-3 Wnt surrogate molecules.

[0047] FIG. 2D. In vitro activity of 1791-3 and 1291-3 Wnt surrogate molecules.

[0048] FIG. 3A. Schematic diagrams of monospecific and multispecific Wnt surrogate molecules.

[0049] FIG. 3B. In vitro activity of Wnt surrogate molecules in 293STF cells.

[0050] FIG. 3C. In vitro activity of Wnt surrogate molecules in 293STF cells overexpressing Fzd4 (293STF Fzd4OE).

[0051] FIG. 3D. In vitro activity of Wnt surrogate molecules in 293STF cells overexpressing Fzd9 (293STF Fzd9OE).

[0052] FIG. 3C. In vitro activity of Wnt surrogate molecules in 293STF cells overexpressing Fzd4 and Fzd9 (293STF Fzd4OE+Fzd9OE).

[0053] FIGS. 4A-4E show sequence alignments of the hinge region of various Fzds (SEQ ID NOs: 2251-2260).

[0054] FIGS. 5A-5C show the structure of heterologous molecules containing soluble ligands for different Fzd receptors together with Lrp5, and their in vitro activity in 293STF cells.

[0055] FIGS. 6A-6E show the structures of Wnt surrogate molecules with different ratios of Fzd to Lrp binders and their impact on Wnt3a activation of beta-catenin-dependent signaling.

[0056] FIGS. 7A-7D show structures containing heterodimerizion of two different Lrp binders together with Fzd binders and their in vitro activity in 293STF cells.

[0057] FIGS. 8A-8J show 1:1 bivalent bispecific L1/F1 tandem scFv molecules are not efficient in activating β-catenin dependent WNT signaling. (A) Diagram of 1:1 bivalent bispecific L1/F1 tandem scFv constructs. Each circle represents a scFv domain, the thin black line at the end of each molecule represent the 6×His tag. (B) Ni resin purified tandem scFv molecules were separated on 4-15% SDS-PAGE gel. Left panel, from left to right: L1-F1 tandem scFv with 5-mer, 10-mer and 15-mer linkers under reducing (R, lanes 1-3) or nonreducing (NR, lanes 4-6) conditions. Right panel, from left to right, F1-L1 tandem scFv with 5-mer, 10-mer and 15-mer linkers under reducing (R, lanes 1-3) or nonreducing (NR, lanes 4-6) conditions. C) and D) The dose dependent STF activity of the Ni resin purified tandem scFv with L1 fused to the N-terminus of F1 (C), or F1 fused to the N-terminus of L1 (D). E) The dose dependent STF activity of the monomer peak fractions from the size exclusive column (SEC) polished tandem scFv with L1 fused to the N-terminus of F1. F) The dose dependent STF activity of the monomer peak fractions from the SEC polished tandem scFv with F1 fused to the N-terminus of L1. G) and H) The STF activity across the SEC fractions of various tandem scFv. The arrows on each panel indicate the position of the monomeric tandem scFv protein. I) The elution profile of the protein standard on the SEC column, thick arrow indicates the expected position of the monomeric form of tandem scFv molecules. J) The addition of anti-His antibody to L1:5:F1 induced significant activation of β-catenin dependent WNT signaling.

[0058] FIG. 9. 1:1 bivalent bispecific L1/F1 tandem scFv molecules are not efficient in activating β-catenin dependent WNT signaling. The dose dependent STF activity of the tandem scFvs, purified either from Ni column alone or additionally purified from SEC column, with L1 fused to the N-terminus of F1 and F1 fused to the N-terminus of L1 comparing to recombinant WNT3A and the surrogate WNT, 18R5-DKK1c. These data are identical to FIG. 1C-1F, except with the positive control molecule data included.

[0059] FIGS. 10A-10F. Increasing the valency of L1 and F1 tandem scFv by fusing to a Fc domain significantly increased the activity in Wnt signal. A) Diagram of F1 and L1 tandem scFv fused to Fc domain to generate the 2:2 tetravalent bispecific formats. B-C) The STF activity across the SEC fractions of the tandem scFv-Fc molecules. D) The elution profile of the protein standard on the SEC column, thick arrow indicates the expected position of the monomeric form of tandem scFv-Fc molecules. E-F) The dose dependent STF activity of the tandem scFv-Fc molecules from the protein peak fractions corresponding to the monomeric forms of the molecules from SEC column.

[0060] FIGS. 11A-11B. The STF activity and Octet binding profiles of the 2:2 tetravalent bispecific F1/L1 molecules. A) The dose dependent STF activity of the F1/L1 bivalent tandem scFv molecules from the protein peak fractions corresponding to the monomeric forms comparing to the recombinant WNT3A and 18R5-DKK1c. These data are identical to FIGS. 2E and 2F, except with the positive control molecule data included. B) The binding affinity of the various 2:2 tetravalent bispecific tandem scFv molecules to FZD1 and LRP6E1E2 measured on the Octet.

[0061] FIGS. 12A-12E. The 2:2 tetravalent bispecific molecules, consisting of the two F1 and two L2 binding arms, are highly potent in inducing Wnt signaling. A) Diagrams representing the 2:2 tetravalent bispecific molecule formats consisting of the FZD binder F1 and the LRP6E3E4 binder L2. The STF activities across the SEC fractions of these various 2:2 molecules are shown below the format diagrams. B-C) The dose dependent STF activities of the 2:2 tetravalent bispecific molecules consisting of F1 and L2 binding arms in both orientations, from the protein peak fractions corresponding to the monomeric forms of each molecules from SEC column. D) The activity of the 2:2 tetravalent bispecific molecules from the combination of F1 and L2 needs the presence of both FZD and LRP6 binding arms, as the substitution of either binding arm by the neutral anti-GFP scFv fragment resulted in no activity. E) Interaction of the molecules from D) to their respective receptors were determined by Octet. The binders L1, L2, and F1 in the IgG1 format were also included as comparators.

[0062] FIGS. 13A-13B. 1:1 bivalent bispecific L2/F1 tandem scFv molecules are not efficient in activating β-catenin dependent WNT signaling. A) The STF activity across the SEC fractions of the 1:1 bivalent bispecific tandem scFv molecules between F1/L2 in both orientations. The molecular format diagrams are also shown on top. The arrows in each panel indicate the position of the monomeric forms of the proteins. B) The dose dependent STF activities of the molecules shown in A) from the protein peak fractions corresponding to the monomeric forms of each molecule from SEC column.

[0063] FIGS. 14A-14I. The 2:2 tetravalent bispecific molecules, consisting of the two F2 and two L1 or L2 binding arms, activate Wnt signaling. A) The molecular format diagrams of the 2:2 tetravalent bispecific molecules consisting of F2 and L1 binding arms and the STF activities across the SEC column of these various surrogate WNT molecules. The arrows in each panel indicate the position of the monomeric forms of the proteins. B) The dose dependent STF activities of the 2:2 tetravalent bispecific molecules consisting of F2 and L1 binding arms in both orientations, from the protein peak fractions corresponding to the monomeric forms of each molecules from SEC column. These surrogate WNT agonists have higher potency but lower efficacy compared to WNT3A in activating Wnt signal. C) and D) The 1:1 bivalent bispecific molecular formats and STF activities across SEC column fractions for molecules consisting of F2 and L2 combinations in both orientations. The F2-L2 orientation does not appear to be active while the reverse L2-F2 orientation seems to be active in the 1:1 format. The arrows in each panel indicate the position of the monomeric forms of the proteins. E) The dose dependent STF activities of the 1:1 bivalent bispecific L2-F2 molecules from the protein peak fractions corresponding to the monomeric forms of each molecules from SEC column. F) and H) The 2:2 tetravalent bispecific molecular formats and STF activities across SEC column fractions for molecules consisting of F2 and L2 combinations in both orientations. The arrows in each panel indicate the position of the monomeric forms of the proteins. G) and I) The dose dependent STF activities of the 2:2 tetravalent bispecific L2/F2 molecules of F) and H) from the protein peak fractions corresponding to the monomeric forms of each molecules from SEC column.

[0064] FIGS. 15A-15B. FZD specific profile of F1, F2, F3, and the STF activities of the 1:1 bivalent bispecific F2/L1 molecules. A) The binding affinity and specificity of F1, F2, and F3 to all 10 FZDs measured on Octet. B) The STF activity across the SEC fractions of the 1:1 bivalent bispecific tandem scFv molecules between F2/L1 in both orientations. The molecular format diagrams are also shown on top. The arrows in each panel indicate the position of the monomeric forms of the proteins. The 1:1 bivalent bispecific format is ineffective in inducing Wnt/β-catenin signaling.

[0065] FIGS. 16A-16D. The 2:2 tetravalent bispecific molecules, consisting of the two F3 and two L1 or L2 binding arms, activate Wnt signaling. A) Diagrams representing the 2:2 tetravalent bispecific molecule formats consisting of the FZD binder F3 and the LRP6 binders L1 or L2 where the FZD binder is attached to the N-terminus of the LRP binders. The STF activities across the SEC fractions of these two 2:2 molecules are shown below the format diagrams. B) Diagrams representing the 2:2 tetravalent bispecific molecule formats consisting of the FZD binder F3 and the LRP6 binders L1 or L2 where the LRP binder is attached to the N-terminus of the FZD binder, the reverse orientation of molecules in A). The STF activities across the SEC fractions of these two 2:2 molecules are shown below the format diagrams. C,D) The dose dependent STF activities of the 2:2 tetravalent bispecific molecules from the protein peak fractions corresponding to the monomeric forms of each molecules from SEC column. C) and D) correspond to molecules from A) and B), respectively.

[0066] FIG. 17. The 1:1 bivalent bispecific L1/F3 or L2/F3 tandem scFv molecules are not efficient in activating β-catenin dependent WNT signaling. The STF activity across the SEC fractions of the 1:1 bivalent bispecific tandem scFv molecules between F3/L1 or F3/L2 in both orientations. The molecular format diagrams are also shown on top. The arrows in each panel indicate the position of the monomeric forms of the proteins. The 1:1 bivalent bispecific format is ineffective in inducing Wnt/β-catenin signaling.

[0067] FIGS. 18A-18B. The 2:2 tetravalent bispecific dumbbell format has similar activity to the 2:2 tetravalent bispecific tandem scFv-Fc format. A) The dose dependent STF activity of the protein peak fractions corresponding to the monomeric forms of each molecules from SEC column. The surrogate WNT agonists tested here are the combination of F1 and L1 in the 2:2 tetravalent bispecific dumbbell format. This format is active, however, show a much lower efficacy compare to WNT3A. There is a preference for L1 to be on the N-terminus of Fc. B) The dose dependent STF activity of the protein peak fractions corresponding to the monomeric forms of each molecules from SEC column. The surrogate WNT agonists tested here are the combination of F1 and L2 in the 2:2 tetravalent bispecific dumbbell format. There is also a preference for L2 to be on the N-terminus of Fc.

[0068] FIGS. 19A-19C. Various 1:1 bivalent bispecific tandem scFv molecules show little to no activity. A) Sequencial binding of FZD8, followed by 1:1 bivalent bispecific tandem scFv molecules, F3:5:L2 and L2:5:F3, then followed by additional of LRP6E3E4 on Octet show that the 1:1 tandem scFv molecules can simultaneously engage both FZD and LRP. B) The diagram of various molecules with the 1:1 stoichiometry between FZD and LRP binders. C) The dose response of the various molecules in B) showed no induction of STF signals.

[0069] FIG. 20A-20B. Various 1:1 bispecific scFv molecules show little to no activity. The diagrams of various combinations of 1:1 bivalent bispecific scFv molecules between F3/L2 and F2/L2 binder pairs. B) The dose response of the various molecules depicted in A,B) showed no induction of STF signals.

[0070] FIGS. 21A-21K. Exploring different stoichiometries of FZD and LRP binders and combining binders of different receptor specificities or epitopes in the 2:2 tetravalent multispecific formats. A,D) The diagrams of molecules with different stoichiometries between FZD and LRP binders, such as 2 FZD binders and 1 LRP binders (2:1) or 1 FZD and 2 LRP binders (1:2). B,C) Dose response of molecules in A) in STF reporter assays. E,F) Dose response of molecules in D) in STF reporter assays. G) Molecular formats of 2:2 tetravalent trispecific molecule where the two FZD binders are of different FZD specificity (1:1:2). H) Dose response of molecules in G) in STF reporter assays. I) Molecular formats of 2:2 tetravalent trispecific molecule where the two FZD binders are of different FZD specificity together with only one LRP binder (1:1:1:0). J) Dose response of the molecules in I) in STF reporter assays. K) Molecular formats of 2:2 tetravalent trispecific molecule where the two FZD binders and the two LRP binders are all of different FZD or LRP specificities (1:1:1:1). H) Dose response of the molecules in K) in STF reporter assays.

### DETAILED DESCRIPTION

[0071] The present disclosure relates to multispecific Wnt surrogate molecules that specifically bind to a plurality of different Fzd receptors and epitopes and to LRP5 and/or LRP6 in order to modulate a Wnt signaling pathway. In particular embodiments, the Wnt surrogate molecules activate a Wnt signaling pathway or increase signaling via a Wnt signaling pathway. In certain aspects, the Wnt surrogate molecules of the present disclosure have: (i) a plurality of regions that each specifically bind to a set of one or more Frizzled (Fzd) receptors and/or epitopes, referred to herein as “Fzd binding regions;” and (ii) one or more regions that specifically bind to a LRP5 and/or a LRP6, referred to herein as “LRP5/6 binding regions.” Certain embodiments encompass specific structural formats or arrangements of the Fzd binding regions and the LRP5/6 binding regions that are advantageous in modulating Wnt signaling pathways and related biological effects, e.g., for the treatment of diseases and disorders associated with Wnt signaling.

[0072] In particular embodiments, the Wnt surrogate molecules disclosed herein include multiple Fzd binding regions with binding specificities for different Fzd receptors and/or epitopes. For example, a Wnt surrogate molecule may include at least two Fzd binding regions that each bind to different sets of one or more Fzd receptors, different sets of one or more epitopes within the same set of one or more Fzd receptors, or a combination thereof. Each Fzd binding region may be monospecific, bispecific, trispecific, etc. for a different Fzd receptor epitope or plurality of Fzd receptor epitopes. Such multispecific Wnt surrogate molecules are capable of selectively activating specific combinations of Fzd receptors, while reducing or eliminating activation of non-targeted Fzd receptors. Embodiments of the present disclosure are advantageous for selectively modulating Wnt signaling in a target cell type and/or for the treatment of a specific disease or disorder, e.g., by reducing off-target effects.

[0073] Embodiments of the invention pertain to the use of Wnt surrogate molecules for the diagnosis, assessment and treatment of diseases and disorders associated with Wnt signaling pathways. In certain embodiments, the subject Wnt surrogate molecules are used to modulate a Wnt signaling pathway in a cell or tissue. In certain embodiments, the subject Wnt surrogate molecules are used in the treatment or prevention of diseases and disorders associated with aberrant or deregulated (e.g., reduced) Wnt signaling, or for which modulating, e.g., increasing, Wnt signaling would provide a therapeutic benefit.

[0074] The practice of the present disclosure will employ, unless indicated specifically to the contrary, conventional methods of virology, immunology, microbiology, molecular biology and recombinant DNA techniques within the skill of the art, many of which are described below for the purpose of illustration. Such techniques are explained fully in the literature. See, e.g., Current Protocols in Molecular Biology or Current Protocols in Immunology, John Wiley & Sons, New York, N.Y. (2009); Ausubel et al., Short Protocols in Molecular Biology, 3^{rd} ed., Wiley & Sons, 1995; Sambrook and Russell, Molecular Cloning: A Laboratory Manual (3rd Edition, 2001); Maniatis et al. Molecular Cloning: A Laboratory Manual (1982); DNA Cloning: A Practical Approach, vol. I & II (D. Glover, ed.); Oligonucleotide Synthesis (N. Gait, ed., 1984); Nucleic Acid Hybridization (B. Hames & S. Higgins, eds., 1985); Transcription and Translation (B. Hames & S. Higgins, eds., 1984); Animal Cell Culture (R. Freshney, ed., 1986); Perbal, A Practical Guide to Molecular Cloning (1984) and other like references.

[0075] As used in this specification and the appended claims, the singular forms “a,” “an” and “the” include plural references unless the content clearly dictates otherwise.

[0076] As used herein, “A and/or B” encompasses one or more of A or B, and combinations thereof such as A and B.

[0077] Throughout this specification, unless the context requires otherwise, the word “comprise”, or variations such as “comprises” or “comprising”, will be understood to imply the inclusion of a stated element or integer or group of elements or integers but not the exclusion of any other element or integer or group of elements or integers.

[0078] Each embodiment in this specification is to be applied mutatis mutandis to every other embodiment unless expressly stated otherwise.

[0079] Standard techniques may be used for recombinant DNA, oligonucleotide synthesis, and tissue culture and transformation (e.g., electroporation, lipofection). Enzymatic reactions and purification techniques may be performed according to manufacturer's specifications or as commonly accomplished in the art or as described herein. These and related techniques and procedures may be generally performed according to conventional methods well known in the art and as described in various general and more specific references that are cited and discussed throughout the present specification. Unless specific definitions are provided, the nomenclature utilized in connection with, and the laboratory procedures and techniques of, molecular biology, analytical chemistry, synthetic organic chemistry, and medicinal and pharmaceutical chemistry described herein are those well-known and commonly used in the art. Standard techniques may be used for recombinant technology, molecular biological, microbiological, chemical syntheses, chemical analyses, pharmaceutical preparation, formulation, and delivery, and treatment of subjects.

[0080] Embodiments of the present disclosure relate to antibodies and antigen-binding fragments thereof that bind to one or more Fzd receptors. Sequences of illustrative antibodies, or antigen-binding fragments, or complementarity determining regions (CDRs) thereof, are set forth in SEQ ID NOs:1-73, Tables 1A and 1B, and Table 5.

[0081] Embodiments of the present disclosure relate to antibodies and antigen-binding fragments thereof that bind to LRP5 and/or LRP6. Sequences of illustrative antibodies, or antigen-binding fragments, or complementarity determining regions (CDRs) thereof, are set forth in SEQ ID NOs:74-97, Tables 2A and 2B, and Table 5.

[0082] As is well known in the art, an antibody is an immunoglobulin molecule capable of specific binding to a target, such as a carbohydrate, polynucleotide, lipid, polypeptide, etc., through at least one epitope recognition site, located in the variable region of the immunoglobulin molecule. As used herein, the term encompasses not only intact polyclonal or monoclonal antibodies, but also fragments thereof (such as dAb, Fab, Fab′, F(ab′)2, Fv), single chain (scFv), Nanobodies® (Nabs; also referred to as VHH or single-domain antibodies (sdAbs)), synthetic variants thereof, naturally occurring variants, fusion proteins comprising an antibody or an antigen-binding fragment thereof, humanized antibodies, chimeric antibodies, and any other modified configuration of the immunoglobulin molecule that comprises an antigen-binding site or fragment (epitope recognition site) of the required specificity. “Diabodies,” multivalent or multispecific fragments constructed by gene fusion (WO94/13804; P. Holliger et al., Proc. Natl. Acad. Sci. USA 90 6444-6448, 1993) are also a particular form of antibody contemplated herein. Minibodies comprising a scFv joined to a CH3 domain are also included herein (S. Hu et al., Cancer Res., 56, 3055-3061, 1996). See e.g., Ward, E. S. et al., Nature 341, 544-546 (1989); Bird et al., Science, 242, 423-426, 1988; Huston et al., PNAS USA, 85, 5879-5883, 1988); PCT/US92/09965; WO94/13804; P. Holliger et al., Proc. Natl. Acad. Sci. USA 90 6444-6448, 1993; Y. Reiter et al., Nature Biotech, 14, 1239-1245, 1996; S. Hu et al., Cancer Res., 56, 3055-3061, 1996.

[0083] The term “antigen-binding fragment” as used herein refers to a polypeptide fragment that contains at least one CDR of an immunoglobulin heavy and/or light chain, or of a VHH or sdAb, that binds to the antigen of interest, in particular to one or more Fzd receptors, or to LRP5 and/or LRP6. In this regard, an antigen-binding fragment of the herein described antibodies may comprise 1, 2, 3, 4, 5, or all 6 CDRs of a VH and VL sequence set forth herein from antibodies that bind one or more Fzd receptors or LRP5 and/or LRP6. In particular embodiments, an antigen-binding fragment may comprise all three VH CDRs or all three VL CDRs. Similarly, an antigen-binding fragment thereof may comprise all three CDRs of a VHH or sdAb. An antigen-binding fragment of a Fzd-specific antibody is capable of binding to a Fzd receptor. An antigen-binding fragment of a LRP5/6-specific antibody is capable of binding to a LRP5 and/or LRP6 receptor. As used herein, the term encompasses not only isolated fragments but also polypeptides comprising an antigen-binding fragment of an antibody disclosed herein, such as, for example, fusion proteins comprising an antigen-binding fragment of an antibody disclosed herein, such as, e.g., a fusion protein comprising a VHH or sdAb that binds one or more Fzd receptors and a VHH or sdAb that binds LRP5 and/or LRP6.

[0084] The term “antigen” refers to a molecule or a portion of a molecule capable of being bound by a selective binding agent, such as an antibody, and additionally capable of being used in an animal to produce antibodies capable of binding to an epitope of that antigen. In certain embodiments, a binding agent (e.g., a Wnt surrogate molecule or binding region thereof) is said to specifically bind an antigen when it preferentially recognizes its target antigen in a complex mixture of proteins and/or macromolecules. In certain embodiments, a Wnt surrogate molecule or binding region thereof (e.g., an antibody or antigen-binding fragment thereof) is said to specifically bind an antigen when the equilibrium dissociation constant is ≤0⁻⁷ or ≤10⁻⁸ M. In some embodiments, the equilibrium dissociation constant may be ≤10⁻⁹ M or ≤10⁻¹⁹ M.

[0085] In certain embodiments, antibodies and antigen-binding fragments thereof as described herein include a heavy chain and a light chain CDR set, respectively interposed between a heavy chain and a light chain framework region (FR) set which provide support to the CDRs and define the spatial relationship of the CDRs relative to each other. As used herein, the term “CDR set” refers to the three hypervariable regions of a heavy or light chain V region. Proceeding from the N-terminus of a heavy or light chain, these regions are denoted as “CDR1,” “CDR2,” and “CDR3” respectively. An antigen-binding site, therefore, includes six CDRs, comprising the CDR set from each of a heavy and a light chain V region. A polypeptide comprising a single CDR, (e.g., a CDR1, CDR2 or CDR3) is referred to herein as a “molecular recognition unit.” Crystallographic analysis of a number of antigen-antibody complexes has demonstrated that the amino acid residues of CDRs form extensive contact with bound antigen, wherein the most extensive antigen contact is with the heavy chain CDR3. Thus, the molecular recognition units are primarily responsible for the specificity of an antigen-binding site.

[0086] As used herein, the term “FR set” refers to the four flanking amino acid sequences which frame the CDRs of a CDR set of a heavy or light chain V region. Some FR residues may contact bound antigen; however, FRs are primarily responsible for folding the V region into the antigen-binding site, particularly the FR residues directly adjacent to the CDRs. Within FRs, certain amino residues and certain structural features are very highly conserved. In this regard, all V region sequences contain an internal disulfide loop of around 90 amino acid residues. When the V regions fold into a binding-site, the CDRs are displayed as projecting loop motifs which form an antigen-binding surface. It is generally recognized that there are conserved structural regions of FRs which influence the folded shape of the CDR loops into certain “canonical” structures—regardless of the precise CDR amino acid sequence. Further, certain FR residues are known to participate in non-covalent interdomain contacts which stabilize the interaction of the antibody heavy and light chains.

[0087] The structures and locations of immunoglobulin CDRs and variable domains may be determined by reference to Kabat, E. A. et al., Sequences of Proteins of Immunological Interest. 4th Edition. US Department of Health and Human Services. 1987, and updates thereof, now available on the Internet (immuno.bme.nwu.edu). The Abgenesis software from Distributed Bio (South San Francisco, Calif.) was used to map the specificity determining regions of the antibodies disclosed herein, which include the Kabat definition of CDRs. (Padlan et al. FASEB J. 9, 133-139 (1995).

[0088] A “monoclonal antibody” refers to a homogeneous antibody population wherein the monoclonal antibody is comprised of amino acids (naturally occurring and non-naturally occurring) that are involved in the selective binding of an epitope. Monoclonal antibodies are highly specific, being directed against a single epitope. The term “monoclonal antibody” encompasses not only intact monoclonal antibodies and full-length monoclonal antibodies, but also fragments thereof (such as Fab, Fab′, F(ab′)2, Fv), single chain (scFv), VHH or sdAbs, variants thereof, fusion proteins comprising an antigen-binding fragment of a monoclonal antibody, humanized monoclonal antibodies, chimeric monoclonal antibodies, and any other modified configuration of the immunoglobulin molecule that comprises an antigen-binding fragment (epitope recognition site) of the required specificity and the ability to bind to an epitope, including Wnt surrogate molecules disclosed herein. It is not intended to be limited as regards the source of the antibody or the manner in which it is made (e.g., by hybridoma, phage selection, recombinant expression, transgenic animals, etc.). The term includes whole immunoglobulins as well as the fragments etc. described above under the definition of “antibody”.

[0089] The proteolytic enzyme papain preferentially cleaves IgG molecules to yield several fragments, two of which (the F(ab) fragments) each comprise a covalent heterodimer that includes an intact antigen-binding site. The enzyme pepsin is able to cleave IgG molecules to provide several fragments, including the F(ab′)₂ fragment which comprises both antigen-binding sites. An Fv fragment for use according to certain embodiments of the present disclosure can be produced by preferential proteolytic cleavage of an IgM, and on rare occasions of an IgG or IgA immunoglobulin molecule. Fv fragments are, however, more commonly derived using recombinant techniques known in the art. The Fv fragment includes a non-covalent V_{H}::V_{L} heterodimer including an antigen-binding site which retains much of the antigen recognition and binding capabilities of the native antibody molecule. Inbar et al. (1972) Proc. Nat. Acad. Sci. USA 69:2659-2662; Hochman et al. (1976) Biochem 15:2706-2710; and Ehrlich et al. (1980) Biochem 19:4091-4096.

[0090] In certain embodiments, single chain Fv or scFV antibodies are contemplated. For example, Kappa bodies (III et al., Prot. Eng. 10: 949-57 (1997)); minibodies (Martin et al., EMBO J 13: 5305-9 (1994)); diabodies (Holliger et al., PNAS 90: 6444-8 (1993)); or Janusins (Traunecker et al., EMBO J 10: 3655-59 (1991) and Traunecker et al., Int. J. Cancer Suppl. 7: 51-52 (1992)), may be prepared using standard molecular biology techniques following the teachings of the present application with regard to selecting antibodies having the desired specificity. In still other embodiments, bispecific or chimeric antibodies may be made that encompass the ligands of the present disclosure. For example, a chimeric antibody may comprise CDRs and framework regions from different antibodies, while bispecific antibodies may be generated that bind specifically to one or more Fzd receptors through one binding domain and to a second molecule through a second binding domain. These antibodies may be produced through recombinant molecular biological techniques or may be physically conjugated together.

[0091] A single chain Fv (scFv) polypeptide is a covalently linked V_{H}::V_{L} heterodimer which is expressed from a gene fusion including V_{H}- and V_{L}-encoding genes linked by a peptide-encoding linker. Huston et al. (1988) Proc. Nat. Acad. Sci. USA 85(16):5879-5883. A number of methods have been described to discern chemical structures for converting the naturally aggregated—but chemically separated—light and heavy polypeptide chains from an antibody V region into an scFv molecule which will fold into a three dimensional structure substantially similar to the structure of an antigen-binding site. See, e.g., U.S. Pat. Nos. 5,091,513 and 5,132,405, to Huston et al.; and U.S. Pat. No. 4,946,778, to Ladner et al.

[0092] In certain embodiments, an antibody as described herein is in the form of a diabody. Diabodies are multimers of polypeptides, each polypeptide comprising a first domain comprising a binding region of an immunoglobulin light chain and a second domain comprising a binding region of an immunoglobulin heavy chain, the two domains being linked (e.g., by a peptide linker) but unable to associate with each other to form an antigen binding site: antigen binding sites are formed by the association of the first domain of one polypeptide within the multimer with the second domain of another polypeptide within the multimer (WO94/13804).

[0093] A dAb fragment of an antibody consists of a VH domain (Ward, E. S. et al., Nature 341, 544-546 (1989)).

[0094] Where bispecific antibodies are to be used, these may be conventional bispecific antibodies, which can be manufactured in a variety of ways (Holliger, P. and Winter G., Current Opinion Biotechnol. 4, 446-449 (1993)), e.g., prepared chemically or from hybrid hybridomas, or may be any of the bispecific antibody fragments mentioned above. Diabodies and scFv can be constructed without an Fc region, using only variable domains, potentially reducing the effects of anti-idiotypic reaction.

[0095] Bispecific diabodies, as opposed to bispecific whole antibodies, may also be particularly useful because they can be readily constructed and expressed in E. coli. Diabodies (and many other polypeptides such as antibody fragments) of appropriate binding specificities can be readily selected using phage display (WO94/13804) from libraries. If one arm of the diabody is to be kept constant, for instance, with a specificity directed against antigen X, then a library can be made where the other arm is varied and an antibody of appropriate specificity selected. Bispecific whole antibodies may be made by knobs-into-holes engineering (J. B. B. Ridgeway et al., Protein Eng., 9, 616-621 (1996)).

[0096] In certain embodiments, the antibodies described herein may be provided in the form of a UniBody®. A UniBody® is an IgG4 antibody with the hinge region removed (see GenMab Utrecht, The Netherlands; see also, e.g., US20090226421). This proprietary antibody technology creates a stable, smaller antibody format with an anticipated longer therapeutic window than current small antibody formats. IgG4 antibodies are considered inert and thus do not interact with the immune system. Fully human IgG4 antibodies may be modified by eliminating the hinge region of the antibody to obtain half-molecule fragments having distinct stability properties relative to the corresponding intact IgG4 (GenMab, Utrecht). Halving the IgG4 molecule leaves only one area on the UniBody® that can bind to cognate antigens (e.g., disease targets) and the UniBody® therefore binds univalently to only one site on target cells.

[0097] In certain embodiments, the antibodies of the present disclosure may take the form of a VHH or sdAb. VHH or sdAb technology was originally developed following the discovery and identification that camelidae (e.g., camels and llamas) possess fully functional antibodies that consist of heavy chains only and therefore lack light chains. These heavy-chain only antibodies contain a single variable domain (V_{HH}) and two constant domains (CH2, CH3). The cloned and isolated single variable domains have full antigen binding capacity and are very stable. These single variable domains, with their unique structural and functional properties, form the basis of “VHH or sdAbs”. VHH or sdAbs are encoded by single genes and are efficiently produced in almost all prokaryotic and eukaryotic hosts, e.g., E. coli (see, e.g., U.S. Pat. No. 6,765,087), molds (for example Aspergillus or Trichoderma) and yeast (for example Saccharomyces, Kluyvermyces, Hansenula or Pichia (see, e.g., U.S. Pat. No. 6,838,254). The production process is scalable and multi-kilogram quantities of VHH or sdAbs have been produced. VHH or sdAbs may be formulated as a ready-to-use solution having a long shelf life. The Nanoclone® method (see, e.g., WO 06/079372) is a proprietary method for generating VHH or sdAbs against a desired target, based on automated high-throughput selection of B-cells. VHH or sdAbs are single-domain antigen-binding fragments of camelid-specific heavy-chain only antibodies. VHH or sdAbs typically have a small size of around 15 kDa.

[0098] In certain embodiments, the antibodies or antigen-binding fragments thereof as disclosed herein are humanized. This refers to a chimeric molecule, generally prepared using recombinant techniques, having an antigen-binding site derived from an immunoglobulin from a non-human species and the remaining immunoglobulin structure of the molecule based upon the structure and/or sequence of a human immunoglobulin. The antigen-binding site may comprise either complete variable domains fused onto constant domains or only the CDRs grafted onto appropriate framework regions in the variable domains. Epitope binding sites may be wild type or modified by one or more amino acid substitutions. This eliminates the constant region as an immunogen in human individuals, but the possibility of an immune response to the foreign variable region remains (LoBuglio, A. F. et al., (1989) Proc Natl Acad Sci USA 86:4220-4224; Queen et al., PNAS (1988) 86:10029-10033; Riechmann et al., Nature (1988) 332:323-327). Illustrative methods for humanization of the anti-Fzd antibodies disclosed herein include the methods described in U.S. Pat. No. 7,462,697.

[0099] Another approach focuses not only on providing human-derived constant regions, but also modifying the variable regions as well so as to reshape them as closely as possible to human form. It is known that the variable regions of both heavy and light chains contain three complementarity-determining regions (CDRs) which vary in response to the epitopes in question and determine binding capability, flanked by four framework regions (FRs) which are relatively conserved in a given species and which putatively provide a scaffolding for the CDRs. When nonhuman antibodies are prepared with respect to a particular epitope, the variable regions can be “reshaped” or “humanized” by grafting CDRs derived from nonhuman antibody on the FRs present in the human antibody to be modified. Application of this approach to various antibodies has been reported by Sato, K., et al., (1993) Cancer Res 53:851-856; Riechmann, L., et al., (1988) Nature 332:323-327; Verhoeyen, M., et al., (1988) Science 239:1534-1536; Kettleborough, C. A., et al., (1991) Protein Engineering 4:773-3783; Maeda, H., et al., (1991) Human Antibodies Hybridoma 2:124-134; Gorman, S. D., et al., (1991) Proc Natl Acad Sci USA 88:4181-4185; Tempest, P. R., et al., (1991) Bio/Technology 9:266-271; Co, M. S., et al., (1991) Proc Natl Acad Sci USA 88:2869-2873; Carter, P., et al., (1992) Proc Natl Acad Sci USA 89:4285-4289; and Co, M. S. et al., (1992) J Immunol 148:1149-1154. In some embodiments, humanized antibodies preserve all CDR sequences (for example, a humanized mouse antibody which contains all six CDRs from the mouse antibodies). In other embodiments, humanized antibodies have one or more CDRs (one, two, three, four, five, six) which are altered with respect to the original antibody, which are also termed one or more CDRs “derived from” one or more CDRs from the original antibody.

[0100] In certain embodiments, the antibodies of the present disclosure may be chimeric antibodies. In this regard, a chimeric antibody is comprised of an antigen-binding fragment of an antibody operably linked or otherwise fused to a heterologous Fc portion of a different antibody. In certain embodiments, the heterologous Fc domain is of human origin. In other embodiments, the heterologous Fc domain may be from a different Ig class from the parent antibody, including IgA (including subclasses IgA1 and IgA2), IgD, IgE, IgG (including subclasses IgG1, IgG2, IgG3, and IgG4), and IgM. In further embodiments, the heterologous Fc domain may be comprised of CH2 and CH3 domains from one or more of the different Ig classes. As noted above with regard to humanized antibodies, the antigen-binding fragment of a chimeric antibody may comprise only one or more of the CDRs of the antibodies described herein (e.g., 1, 2, 3, 4, 5, or 6 CDRs of the antibodies described herein), or may comprise an entire variable domain (VL, VH or both).

### Wnt Surrogates

[0101] The disclosure provides, in certain aspects, Wnt surrogate molecules that bind both one or more Fzd receptors and one or both of LRP5 and/or LRP6. Wnt surrogate molecules may also be referred to as “Wnt surrogates” or “Wnt mimetics.” In particular embodiments, the Wnt surrogate molecules bind one or more human Fzd receptors and one or both of a human LRP5 and/or a human LRP6.

[0102] In certain embodiments, a Wnt surrogate molecule is capable of modulating or modulates Wnt signaling events in a cell contacted with the Wnt surrogate molecule. In certain embodiments, the Wnt surrogate molecule increases Wnt signaling, e.g., via the canonical Wnt/β-catenin pathway. In certain embodiments, the Wnt surrogate molecule specifically modulates the biological activity of a human Wnt signaling pathway.

[0103] Wnt surrogate molecules of the present disclosure are biologically active in binding to one or more Fzd receptors and to one or more of LRP5 and LRP6, and in activation of Wnt signaling, i.e., the Wnt surrogate molecule is a Wnt agonist. The term “Wnt agonist activity” refers to the ability of an agonist to mimic the effect or activity of a Wnt protein binding to an Fzd receptor and/or LRP5 or LRP6. The ability of the Wnt surrogate molecules and other Wnt agonists disclosed herein to mimic the activity of Wnt can be confirmed by a number of assays. Wnt agonists typically initiate a reaction or activity that is similar to or the same as that initiated by the receptor's natural ligand. In particular, the Wnt agonists disclosed herein activate, enhance or increase the canonical Wnt/β-catenin signaling pathway. As used herein, the term “enhances” refers to a measurable increase in the level of Wnt/β-catenin signaling compared with the level in the absence of a Wnt agonist, e.g., a Wnt surrogate molecule disclosed herein. In particular embodiments, the increase in the level of Wnt/β-catenin signaling is at least 10%, at least 20%, at least 50%, at least two-fold, at least five-fold, at least 10-fold, at least 20-fold, at least 50-fold, or at least 100-fold as compared to the level of Wnt/β-catenin signaling in the absence of the Wnt agonist, e.g., in the same cell type. Methods of measuring Wnt/β-catenin signaling are known in the art and include those described herein. Wnt surrogate molecules disclosed herein are multispecific, i.e., they specifically bind to two or more different epitopes. At least one epitope is within one or more Fzd receptors and at least one epitope binds to LRP5 and/or LRP6. In particular embodiments, multispecific Wnt surrogate molecules are multispecific with respect to Fzd receptor binding, i.e., they specifically bind to two or more different types of Fzd receptors, two or more different epitopes within a single type of Fzd receptor, or a combination thereof. For example, a multispecific Wnt surrogate molecule may bind to two or more of Fzd1, Fzd2, Fzd3, Fzd4, Fzd5, Fzd6, Fzd7, Fzd8, Fzd9, and Fzd10. In certain embodiments, a multispecific Wnt surrogate molecule binds to: (i) Fzd1, Fzd2, Fzd7, and Fzd9; (ii) Fzd1, Fzd2, and Fzd7; (iii) Fzd5 and Fzd8; (iv) Fzd5, Fzd7, and Fzd8; (v) Fzd1, Fzd4, Fzd5, and Fzd8; (vi) Fzd1, Fzd2, Fzd5, Fzd7, and Fzd8; (vii) Fzd4 and Fzd9; (viii) Fzd9 and Fzd10; (ix) Fzd5, Fzd8, and Fzd10; (x) Fzd4, Fzd5, and Fzd8; or (xi) Fzd1, Fzd5, Fzd7 and Fzd8.

[0104] In certain embodiments, a Wnt surrogate molecule that is multispecific with respect to Fzd binding includes at least one Fzd binding region that binds to a plurality of different Fzd receptor epitopes, e.g., epitopes within different Fzd receptors, different epitopes within the same Fzd receptor, or combinations thereof. For example, the Wnt surrogate molecule may include at least one Fzd binding region that binds to two or more Fzd receptors, e.g., two or more of Fzd1, Fzd2, Fzd3, Fzd4, Fzd5, Fzd6, Fzd7, Fzd8, Fzd9, and Fzd10. As another example, the Wnt surrogate molecule may include at least one Fzd binding region that binds to: (i) Fzd1, Fzd2, Fzd7 and Fzd9; (ii) Fzd1, Fzd2 and Fzd7; (iii) Fzd5 and Fzd8; (iv) Fzd5, Fzd7 and Fzd8; (v) Fzd1, Fzd4, Fzd5 and Fzd8; (vi) Fzd1, Fzd2, Fzd5, Fzd7 and Fzd8; (vii) Fzd4 and Fzd9; (viii) Fzd9 and Fzd10; (ix) Fzd5, Fzd8 and Fzd10; (x) Fzd4, Fzd5 and Fzd8; or (xi) Fzd1, Fzd5, Fzd7 and Fzd8.

[0105] Alternatively, or in combination, in certain embodiments, a Wnt surrogate that is multispecific with respect to Fzd binding includes at least two Fzd binding regions that each bind to different sets of one or more Fzd receptor epitopes, e.g., epitopes within different Fzd receptors, different epitopes within the same Fzd receptor, or combinations thereof. A set of one or more Fzd receptor epitopes may include one, two, three, four, five, six, seven, eight, nine, ten, or more Fzd receptor epitopes, such that each Fzd binding region may be monospecific, bispecific, trispecific, tetraspecific, etc.

[0106] In certain embodiments, a multispecific Wnt surrogate includes two or more Fzd binding regions, wherein one or more of these Fzd binding regions specifically binds only one Fzd receptor or receptor epitope. In certain embodiments, two or more, three or more, or four or more Fzd binding regions within the mutispecific Wnt surrogate each specifically bind only one Fzd receptor or receptor epitope, wherein at least two or more, at least three or more, or at least four or more of the Fzd binding regions specifically bind different Fzd receptors and/or receptor epitopes.

[0107] In certain embodiments, the Wnt surrogate molecule includes a first Fzd binding region that binds to a first set of one or more Fzd receptor epitopes, and a second Fzd binding region that binds to a second, different set of one or more Fzd receptor epitopes. For example, the first Fzd binding region may bind to a first set of one or more Fzd receptors, and the second Fzd binding region may bind to a second, different set of one or more Fzd receptors. Alternatively or in combination, the first Fzd binding region may bind to a first set of one or more epitopes within a set of one or more Fzd receptors, and the second Fzd binding region may bind to a second, different set of one or more epitopes within the same set of one or more Fzd receptors. In certain embodiments, the first Fzd binding region binds to one or more of Fzd1, Fzd2, Fzd3, Fzd4, Fzd5, Fzd6, Fzd7, Fzd8, Fzd9, and Fzd10. In certain embodiments, the second Fzd binding region binds to one or more of Fzd1, Fzd2, Fzd3, Fzd4, Fzd5, Fzd6, Fzd7, Fzd8, Fzd9, and Fzd10.

[0108] In certain embodiments, the Wnt surrogate molecule includes a first Fzd binding region and a second Fzd binding region, wherein: the first Fzd binding region binds to Fzd1 and the second Fzd binding region binds to Fzd2; the first Fzd binding region binds to Fzd1 and the second Fzd binding region binds to Fzd3; the first Fzd binding region binds to Fzd1 and the second Fzd binding region binds to Fzd4; the first Fzd binding region binds to Fzd1 and the second Fzd binding region binds to Fzd5; the first Fzd binding region binds to Fzd1 and the second Fzd binding region binds to Fzd6; the first Fzd binding region binds to Fzd1 and the second Fzd binding region binds to Fzd7; the first Fzd binding region binds to Fzd1 and the second Fzd binding region binds to Fzd8; the first Fzd binding region binds to Fzd1 and the second Fzd binding region binds to Fzd9; or the first Fzd binding region binds to Fzd1 and the second Fzd binding region binds to Fzd10.

[0109] In certain embodiments, the Wnt surrogate molecule includes a first Fzd binding region and a second Fzd binding region, wherein: the first Fzd binding region binds to Fzd2 and the second Fzd binding region binds to Fzd3; the first Fzd binding region binds to Fzd2 and the second Fzd binding region binds to Fzd4; the first Fzd binding region binds to Fzd2 and the second Fzd binding region binds to Fzd5; the first Fzd binding region binds to Fzd2 and the second Fzd binding region binds to Fzd6; the first Fzd binding region binds to Fzd2 and the second Fzd binding region binds to Fzd7; the first Fzd binding region binds to Fzd2 and the second Fzd binding region binds to Fzd8; the first Fzd binding region binds to Fzd2 and the second Fzd binding region binds to Fzd9; or the first Fzd binding region binds to Fzd2 and the second Fzd binding region binds to Fzd10.

[0110] In certain embodiments, the Wnt surrogate molecule includes a first Fzd binding region and a second Fzd binding region, wherein: the first Fzd binding region binds to Fzd3 and the second Fzd binding region binds to Fzd4; the first Fzd binding region binds to Fzd3 and the second Fzd binding region binds to Fzd5; the first Fzd binding region binds to Fzd3 and the second Fzd binding region binds to Fzd6; the first Fzd binding region binds to Fzd3 and the second Fzd binding region binds to Fzd7; the first Fzd binding region binds to Fzd3 and the second Fzd binding region binds to Fzd8; the first Fzd binding region binds to Fzd3 and the second Fzd binding region binds to Fzd9; or the first Fzd binding region binds to Fzd3 and the second Fzd binding region binds to Fzd10.

[0111] In certain embodiments, the Wnt surrogate molecule includes a first Fzd binding region and a second Fzd binding region, wherein: the first Fzd binding region binds to Fzd4 and the second Fzd binding region binds to Fzd5; the first Fzd binding region binds to Fzd4 and the second Fzd binding region binds to Fzd6; the first Fzd binding region binds to Fzd4 and the second Fzd binding region binds to Fzd7; the first Fzd binding region binds to Fzd4 and the second Fzd binding region binds to Fzd8; the first Fzd binding region binds to Fzd4 and the second Fzd binding region binds to Fzd9; or the first Fzd binding region binds to Fzd4 and the second Fzd binding region binds to Fzd10.

[0112] In certain embodiments, the Wnt surrogate molecule includes a first Fzd binding region and a second Fzd binding region, wherein: the first Fzd binding region binds to Fzd5 and the second Fzd binding region binds to Fzd6; the first Fzd binding region binds to Fzd5 and the second Fzd binding region binds to Fzd7; the first Fzd binding region binds to Fzd5 and the second Fzd binding region binds to Fzd8; the first Fzd binding region binds to Fzd5 and the second Fzd binding region binds to Fzd9; or the first Fzd binding region binds to Fzd5 and the second Fzd binding region binds to Fzd10.

[0113] In certain embodiments, the Wnt surrogate molecule includes a first Fzd binding region and a second Fzd binding region, wherein: the first Fzd binding region binds to Fzd6 and the second Fzd binding region binds to Fzd7; the first Fzd binding region binds to Fzd6 and the second Fzd binding region binds to Fzd8; the first Fzd binding region binds to Fzd6 and the second Fzd binding region binds to Fzd9; or the first Fzd binding region binds to Fzd6 and the second Fzd binding region binds to Fzd10.

[0114] In certain embodiments, the Wnt surrogate molecule includes a first Fzd binding region and a second Fzd binding region, wherein: the first Fzd binding region binds to Fzd7 and the second Fzd binding region binds to Fzd8; the first Fzd binding region binds to Fzd7 and the second Fzd binding region binds to Fzd9; or the first Fzd binding region binds to Fzd7 and the second Fzd binding region binds to Fzd10.

[0115] In certain embodiments, the Wnt surrogate molecule includes a first Fzd binding region and a second Fzd binding region, wherein: the first Fzd binding region binds to Fzd8 and the second Fzd binding region binds to Fzd9; or the first Fzd binding region binds to Fzd8 and the second Fzd binding region binds to Fzd10. In certain embodiments, the Wnt surrogate molecule includes a first Fzd binding region and a second Fzd binding region, wherein the first Fzd binding region binds to Fzd9 and the second Fzd binding region binds to Fzd10.

[0116] For each of the combinations of Fzd receptors disclosed above, it is understood that, in certain embodiments, the first or second binding region may specifically bind only the indicated Fzd, or it may also bind additional Fzds. For example, wherein the first Fzd binding region binds to Fzd1 and the second Fzd binding region binds to Fzd2, the first Fzd binding region may specifically bind only Fzd1, or it may also bind to one or more other Fzds in addition to Fzd1. Similarly, the second Fzd binding region may specifically bind only Fzd2, or it may also bind to one or more other Fzds in addition to Fzd2. However, the first and second Fzd binding regions bind to different sets of Fzd receptors.

[0117] In certain embodiments, the first and second binding regions may specifically bind to different epitopes within the same Fzd receptor. For example, the first binding region may bind to a first epitope in Fzd1, and the second binding region may bind to a second, different epitope in Fzd1. The first binding region may bind to a first epitope in Fzd2, and the second binding region may bind to a second, different epitope in Fzd2. The first binding region may bind to a first epitope in Fzd3, and the second binding region may bind to a second, different epitope in Fzd3. The first binding region may bind to a first epitope in Fzd4, and the second binding region may bind to a second, different epitope in Fzd4. The first binding region may bind to a first epitope in Fzd5, and the second binding region may bind to a second, different epitope in Fzd5. The first binding region may bind to a first epitope in Fzd6, and the second binding region may bind to a second, different epitope in Fzd6. The first binding region may bind to a first epitope in Fzd7, and the second binding region may bind to a second, different epitope in Fzd7. The first binding region may bind to a first epitope in Fzd8, and the second binding region may bind to a second, different epitope in Fzd8. The first binding region may bind to a first epitope in Fzd9, and the second binding region may bind to a second, different epitope in Fzd9. The first binding region may bind to a first epitope in Fzd10, and the second binding region may bind to a second, different epitope in Fzd10.

[0118] For each of the combinations of Fzd receptor epitopes disclosed above, it is understood that, in certain embodiments, the first or second binding regions may specifically bind only the indicated epitope, or may also bind additional epitopes. For example, wherein the first binding region binds to a first epitope in Fzd1, and the second binding region binds to a second, different epitope in Fzd1, the first binding region may specifically bind only the first epitope in Fzd1, or it may also bind to one or more other epitopes in Fzd1 or other Fzd receptors. Similarly, the second Fzd binding region may specifically bind only the second epitope in Fzd1, or it may also bind to one or more other epitopes in Fzd1 or other Fzd receptors. In embodiments where the first and second binding regions specifically bind to the same Fzd receptor or receptors, the first and second binding regions bind to different epitopes within the same receptor(s).

[0119] In particular embodiments, multispecific Wnt surrogate molecules are multispecific with respect to LRP5/6 binding, i.e., they specifically bind to two or more different epitopes within LRP5 and/or LRP6. In certain embodiments, a multispecific Wnt surrogate molecule includes a first LRP5/6 binding region that binds to a first epitope within LRP5 and/or LRP6, and a second LRP5/6 binding region that binds to a second, different epitope within LRP5 and/or LRP6.

[0120] For each of the combinations of the LRP receptor epitopes, it is understood that, in certain embodiments, the first or second binding regions may specifically bind only the indicated epitope, or may also bind additional epitopes. For example, wherein the first binding region binds to a first epitope in LRP5E1E2, and the second binding region binds to a second, different epitope in LRP5E1E2, the first binding region may specifically bind only the first epitope in LRP5E1E2, or it may also bind to one or more other epitopes in LRP5E1E2 or other LRP receptors. Similarly, the second LRP binding region may specifically bind only the second epitope in LRP5E1E2, or it may also bind to one or more other epitopes in LRP5E1E2 or other LRP receptors. In embodiments where the first and second binding regions specifically bind to the same LRP receptor or receptors, the first and second binding regions bind to different epitopes within the same receptor(s). Similar epitope binding can occur for LRP5E3E4, LRP6E1E2, and LRP6E3E4. In particular embodiments, multispecific Wnt surrogate molecules are multispecific with respect to both Fzd binding and LRP5/6 binding. For example, a Wnt surrogate molecule may include a plurality of Fzd binding regions that each specifically bind to a different set of one or more Fzd receptors, and a plurality of LRP5/6 binding regions that each specifically bind to a different epitope within LRP5 and/or LRP6. It shall be appreciated that the various embodiments of Fzd binding regions and LRP5/6 binding regions disclosed herein may be combined in many ways to generate multispecific Wnt surrogate molecules with any desired combination of Fzd and LRP5/6 binding specificity.

[0121] In particular embodiments, Wnt surrogate molecules disclosed herein are multivalent, e.g., they comprise two or more regions that each specifically bind to the same epitope, e.g., two or more regions that bind to an epitope within one or more Fzd receptors and/or two or more regions that bind to an epitope within LRP5 and/or LRP6. In particular embodiments, they comprise two or more regions that bind to an epitope within one or more Fzd receptors and two or more regions that bind to an epitope within LRP5 and/or LRP6.

[0122] In particular embodiments, Wnt surrogate molecule comprise Fzd binding regions and LRP5/6 binding regions in a ratio of Fzdₙ:LRP5/6n (Fₙ:Lₙ), wherein F and L are integers between 1 and 9, inclusive, and n is an integer between 1 and 4 inclusive.

[0123] In certain embodiments, Wnt surrogate molecules comprise a ratio of the number of regions that bind one or more Fzd receptors to the number of regions that bind LRP5 and/or LRP6 of or about: 1:1, 2:1, 3:1, 4:1, 5:1, 6:1, 2:1 2:3, 2:5, 2:7, 7:2, 5:2, 3:2, 3:4, 3:5, 3:7, 3:8, 8:3, 7:3, 5:3, 4:3, 4:5, 4:7, 4:9, 9:4, 7:4, 5:4, 6:7, 7:6, 1:2, 1:3, 1:4, 1:5, 1:6, 2:1 (with two Fzd binders and one LRP binder), 1:2 (with one Fzd binder and two LRP binders), 2:1:1 (with two different LRP binders), 1:1:2 (with two different Fzd binders), 1:1:1 (two different Fzd binders and one LRP binder or one Fzd binder and two different LRP binders) and 1:1:1:1 (all different Fzd and LRP binders). Varying the ratios of Fzd binding moieties to LRP5/6 binding moieties can confer tissue and/or functional specificity and modulate signaling levels. In certain embodiments, Wnt surrogate molecules are multispecific and multivalent.

[0124] Wnt surrogate molecules disclosed herein may have any of a variety of different structural formats or configurations. Wnt surrogate molecules may comprise polypeptides and/or non-polypeptide binding moieties, e.g., small molecules. In particular embodiments, Wnt surrogate molecules comprise both a polypeptide region and a non-polypeptide binding moiety. In certain embodiments, Wnt surrogate molecules may comprise a single polypeptide, or they may comprise two or more, three or more, or four or more polypeptides. In certain embodiments, the Wnt surrogates comprises one, two, three, or four polypeptides, e.g., linked or bound to each other or fused to each other.

[0125] When the Wnt surrogate molecules comprise a single polypeptide, they may be a fusion protein comprising one or more Fzd binding regions (also referred to herein as “Fzd binding domains”) and one or more LRP5/6 binding regions (also referred to herein as “LRP5/6 binding domains”). The binding regions may be directly fused or they may be connected via a linker, e.g., a polypeptide or chemical linker, including but not limited to any of those disclosed herein.

[0126] When the Wnt surrogate molecules comprise two or more polypeptides, the polypeptides may be linked via covalent bonds, such as, e.g., disulfide bonds, and/or noncovalent interactions. For example, heavy chains of human immunoglobulin IgG interact at the level of their CH3 domains directly, whereas, at the level of their CH2 domains, they interact via the carbohydrate attached to the asparagine (Asn) N84.4 in the DE turn.

[0127] Wnt surrogate polypeptides may be engineered to facilitate binding between two polypeptides. For example, knobs-into-holes amino acid modifications may be introduced into two different polypeptides to facilitate their binding. Knobs-into-holes amino acid (AA) changes is a rational design strategy developed in antibody engineering, used for heterodimerization of the heavy chains, in the production of bispecific IgG antibodies. AA changes are engineered in order to create a knob on the CH3 of the heavy chains from a first antibody and a hole on the CH3 of the heavy chains of a second antibody. The knob may be represented by a tyrosine (Y) that belongs to the ‘very large’ IMGT volume class of AA, whereas the hole may be represented by a threonine (T) that belongs to the ‘small’ IMGT volume class. Other means of introducing modifications into polypeptides to facilitate their binding are known and available in the art. For example, specific amino acids may be introduced and used for cross-linking, such as Cysteine to form an intermolecular disulfide bond.

[0128] In particular embodiments, the Wnt surrogate molecules comprise one or more binding regions derived from an antibody or antigen-binding fragment thereof, e.g., antibody heavy chains or antibody light chains or fragments thereof. In certain embodiments, one or more polypeptides of a Wnt surrogate molecule are antibodies or antigen-binding fragments thereof. In certain embodiments, Wnt surrogates comprise two antibodies or antigen-binding fragments thereof, e.g., one that binds one or more Fzd receptors and one that binds LRP5 and/or LRP6. In certain embodiments, Wnt surrogates comprise three antibodies or antigen-binding fragments thereof, e.g., one that binds a first set of one or more Fzd receptor epitopes, one that binds a second, different set of one or more Fzd receptor epitopes, and one that binds LRP5 and/or LRP6. In certain embodiments, Wnt surrogates comprise four antibodies or antigen-binding fragments thereof, e.g., one that binds a first set of one or more Fzd receptor epitopes, one that binds a second, different set of one or more Fzd receptor epitopes, one that binds a first epitope within LRP5 and/or LRP6, and one that binds a second, different epitope within LRP5 and/or LRP6.

[0129] In certain embodiments, a Wnt surrogate molecule includes a polypeptide comprising two antibody heavy chain regions (e.g., hinge regions) bound together via one or more disulfide bond. In certain embodiments, a Wnt surrogate molecule includes a polypeptide comprising an antibody light chain region (e.g., a CL region) and an antibody heavy chain region (e.g., a CH1 region) bound together via one or more disulfide bonds.

[0130] Wnt surrogate molecules may have a variety of different structural formats, including but not limited to those shown in FIG. 1.

[0131] In one embodiment, a Wnt surrogate molecule comprises an scFv or antigen-binding fragment thereof fused to a VHH or sdAb or antigen-binding fragment thereof. In certain embodiments, the scFv specifically binds one or more Fzd receptor epitopes, and the VHH or sdAb specifically binds LRP5 and/or LRP6. In certain embodiments, the scFv specifically binds LRP5 and/or LRP6, and the VHH or sdAb specifically binds one or more Fzd receptor epitopes. In particular embodiments, the scFv or antigen-binding fragment thereof is fused directly to the VHH or sdAb or antigen-binding fragment thereof, whereas in other embodiments, the two binding regions are fused via a linker moiety. In particular embodiments, the VHH or sdAb is fused to the N-terminus of the scFV, while in other embodiments, the VHH or sdAb is fused to the C-terminus of the scFv. In particular embodiments, the scFv is described herein or comprises any of the CDR sets described herein. In particular embodiments, the VHH or sdAb is described herein or comprises any of the CDR sets disclosed herein.

[0132] In various embodiments, including but not limited to those depicted in FIG. 1, a Wnt surrogate molecule comprises one or more Fabs or antigen-binding fragment thereof and one or more VHH or sdAbs or antigen-binding fragment thereof (or alternatively, one or more scFvs or antigen-binding fragment thereof). In certain embodiments, the Wnt surrogate comprises two or more Fabs, each of which specifically binds to different sets of one or more Fzd receptor epitopes, and the VHH or sdAb (or scFv) specifically binds LRP5 and/or LRP6. In certain embodiments, the Wnt surrogate comprises a Fab that specifically binds LRP5 and/or LRP6, and two or more VHH or sdAb (or scFv), each of which specifically binds to different sets of one or more Fzd receptor epitopes. In certain embodiments, the VHH or sdAbs (or scFvs) are fused to the N-terminus of the Fab, while in some embodiments, the VHH or sdAbs (or scFvs) are fused to the C-terminus of the Fab. In particular embodiments, the Fab is present in a full IgG format, and the VHH or sdAbs (or scFvs) are fused to the N-terminus and/or C-terminus of the IgG light chain. In particular embodiments, the Fab is present in a full IgG format, and the VHH or sdAbs (or scFvs) are fused to the N-terminus and/or C-terminus of the IgG heavy chain. In particular embodiments, two or more VHH or sdAbs (or scFvs) are fused to the IgG at any combination of these locations, where each of the two or more VHH or sdAbs (or scFvs) bind different sets of Fzds.

[0133] Fabs may be converted into a full IgG format that includes both the Fab and Fc fragments, for example, using genetic engineering to generate a fusion polypeptide comprising the Fab fused to an Fc region, i.e., the Fab is present in a full IgG format. The Fc region for the full IgG format may be derived from any of a variety of different Fcs, including but not limited to, a wild-type or modified IgG1, IgG2, IgG3, IgG4 or other isotype, e.g., wild-type or modified human IgG1, human IgG2, human IgG3, human IgG4, human IgG4Pro (comprising a mutation in core hinge region that prevents the formation of IgG4 half molecules), human IgA, human IgE, human IgM, or the modified IgG1 referred to as IgG1 LALAPG. The L234A, L235A, P329G (LALA-PG) variant has been shown to eliminate complement binding and fixation as well as Fc-γ dependent antibody-dependent cell-mediated cytotoxity (ADCC) in both murine IgG2a and human IgG1. These LALA-PG substitutions allow a more accurate translation of results generated with an “effectorless” antibody framework scaffold between mice and primates. In particular embodiments of any of the IgG disclosed herein, the IgG comprises one or more of the following amino acid substitutions: N297G, N297A, N297E, L234A, L235A, or P236G.

[0134] Non-limiting examples of bivalent and bispecific Wnt surrogate molecules that are bivalent towards both the one or more Fzd receptor epitopes and the LRP5 and/or LRP6 are provided as the top four structures depicted in FIG. 1, where the VHH or sdAbs or scFvs are depicted as single solid ovals in red, blue or yellow, and the Fab or IgG is depicted in blue. As shown, the VHH or sdAbs (or scFvs) may be fused to the N-termini of both light chains, to the N-termini of both heavy chains, to the C-termini of both light chains, or to the C-termini of both heavy chains. It is further contemplated, e.g., that VHH or sdAbs (or scFvs) could be fused to both the N-termini and C-termini of the heavy and/or light chains, to the N-termini of the light chains and the heavy chains, to the C-termini of the heavy and light chains, to the N-termini of the heavy chains and C-termini of the light chains, or to the C-termini of the heavy chains and the N-termini of the light chains. In other related embodiments, two or more VHH or sdAbs (or scFvs) may be fused together, optionally via a linker moiety, and fused to the Fab or IgG at one or more of these locations. In particular embodiments, the two or more VHH or sdAbs (or scFvs) may each bind to a different set of one or more Fzd receptor epitopes.

[0135] In a related embodiment, the Wnt surrogate molecule has a hetero-Ig format, whereas the Fab is present as a half antibody, and one or more VHH or sdAb (or scFv) is fused to one or more of the N-terminus of the Fc, the N-terminus of the Fab, the C-terminus of the Fc, or the C-terminus of the Fab. In particular embodiments, two or more VHH or sdAbs (or scFvs) are fused to the N-terminus of the Fc, the N-terminus of the Fab, the C-terminus of the Fc, or the C-terminus of the Fab, wherein each of the VHH or sdAbs (or scFvs) binds a different set of one or more Fzd receptor epitopes. A bispecific but monovalent to each receptor version of this format is depicted in FIG. 1C, 1D, 1E, 1F, which may be modified to include two or more Fzd binding regions, wherein at least two of the Fzd binding regions bind to different sets of one or more Fzd receptor epitopes. In certain embodiments, the Fab or antigen-binding fragment (or IgG) thereof is fused directly to the VHH or sdAb (or scFv) or antigen-binding fragment thereof, whereas in other embodiments, the binding regions are fused via a linker moiety. In particular embodiments, the Fab is described herein or comprises any of the CDR sets described herein. In particular embodiments, the VHH or sdAbs or scFvs are described herein or comprises any of the CDR sets disclosed herein.

[0136] In various embodiments, including but not limited to those depicted in FIG. 1V, 1W, 1X, 1AA, a Wnt surrogate molecule comprises one or more Fabs or antigen-binding fragment thereof that binds one or more Fzd receptor epitopes and one or more Fabs or antigen-binding fragment thereof that binds LRP5 and/or LRP6. In certain embodiments, it comprises two Fab or antigen-binding fragments thereof that bind different sets of one or more Fzd receptor epitopes and/or two Fab or antigen-binding fragments thereof that bind LRP5 and/or LRP6. In particular embodiments, one or more of the Fabs are present in a full IgG format, and in certain embodiments, both Fabs are present in a full IgG format. In certain embodiments, the Fabs in full IgG format specifically binds one or more Fzd receptor epitopes, and the other Fabs specifically binds LRP5 and/or LRP6. In certain embodiments, the Fabs specifically bind different sets of one or more Fzd receptor epitopes, and the Fabs in full IgG format specifically binds LRP5 and/or LRP6. In certain embodiments, the Fabs specifically binds LRP5 and/or LRP6, and the Fabs in full IgG format specifically bind different sets of one or more Fzd receptor epitopes. In certain embodiments, the Fab is fused to the N-terminus of the IgG, e.g., to the heavy chain or light chain N-terminus, optionally via a linker. In certain embodiments, the Fab is fused to the N-terminus of the heavy chain of the IgG and not fused to the light chain. In particular embodiments, the two heavy chains can be fused together directly or via a linker. An example of such a bispecific and bivalent with respect to both receptors is shown in FIGS. 1V, 1W, 1X and 1AA. In other related embodiments, two or more VHH or sdAbs may be fused together, optionally via a linker moiety, and fused to the Fab or IgG at one or more of these locations. In a related embodiment, the Wnt surrogate molecule has a hetero-IgG format, whereas one of the Fab is present as a half antibody, and the other Fab is fused to one or more of the N-terminus of the Fc, the N-terminus of the Fab, or the C-terminus of the Fc. A bispecific but monovalent to each receptor version of this format is depicted in FIG. 1D, which may be modified to includes one or more additional Fab, wherein two or more Fab bind to different sets of Fzd receptor epitopes. In certain embodiments, the Fab or antigen-binding fragment thereof is fused directly to the other Fab or IgG or antigen-binding fragment thereof, whereas in other embodiments, the binding regions are fused via a linker moiety. In particular embodiments, the one or both of the two Fabs are described herein or comprise any of the CDR sets described herein.

[0137] In certain embodiments, Wnt surrogate molecules have a format as described in PCT Application Publication No. WO2017/136820, e.g., a Fabs-in-tandem IgG (FIT-IG) format. Shiyong Gong, Fang Ren, Danqing Wu, Xuan Wu & Chengbin Wu (2017). FIT-IG also include the formats disclosed in “Fabs-in-tandem immunoglobulin is a novel and versatile bispecific design for engaging multiple therapeutic targets” mAbs, 9:7, 1118-1128, DOI: 10.1080/19420862.2017.1345401. In certain embodiments, FIT-IGs combine the functions of two antibodies into one molecule by re-arranging the DNA sequences of two parental monoclonal antibodies into two or three constructs and co-expressing them in mammalian cells. Examples of FIT-IG formats and constructs are provided in FIGS. 1A and 1B and FIGS. 2A and 2B of PCT Application Publication No. WO2017/136820. In certain embodiments, FIT-IGs require no Fc mutation, no scFv elements, and no linker or peptide connector. The Fab-domains in each arm work “in tandem” forming a tetravalent bi-specific antibody with four active and independent antigen binding sites that retain the biological function of their parental antibodies In particular embodiments, Wnt surrogates comprises a Fab and an IgG. In certain embodiments, the Fab binder LC is fused to the HC of the IgG, e.g., by a linker of various length in between. In various embodiment, the Fab binder HC can be fused or unfused to the LC of the IgG. A variation of this format has been called Fabs-in-tandem IgG (or FIT-Ig). In certain embodiments, the FIT-Ig comprises two or more Fzd binding domains, wherein at least two or the Fzd binding regions bind to different sets of one or more Fzd receptor epitopes, e.g., different sets of one or more Fzd receptors or different sets of one or more epitopes within the same Fzd receptor(s).

[0138] In particular embodiments, Wnt surrogate molecules comprise two or more VHH or sdAbs (or scFvs), including at least one that binds one or more Fzd receptor epitopes and at least one that binds LRP5 and/or LRP6. In certain embodiments, one of the binding regions is a VHH or sdAb and the other is an scFv. In particular embodiments, the Wnt surrogate molecules comprises three or more VHH or sdAbs (or scFvs), including at least two that binds different sets of one or more Fzd receptor epitopes and at least one that binds LRP5 and/or LRP6. Wnt surrogate molecules comprising two or more VHH or sdAbs (or scFvs) may be formatted in a variety of configurations, including but not limited to those depicted in FIG. 1K, 1L, 1M, 1N, 1O, 1P, 1Q, 1s, 1T. In certain bispecific, bivalent formats, two or more VHH or sdAbs (or scFvs) are fused in tandem or fused to two different ends of an Fc, optionally via one or more linkers. Where linkers are present, the linker and its length may be the same or different between the VHH or sdAb (or scFv) and the other VHH or sdAb (or scFv), or between the VHH or sdAb and Fc. For example, in certain embodiments, the VHH or sdAb is fused to the N-terminus and/or C-terminus of the IgG heavy chain. In particular embodiments, two or more VHH or sdAbs are fused to the IgG at any combination of these locations. Non-limiting examples of bivalent and bispecific Wnt surrogate molecules of this format are depicted as the structures depicted in FIG. 1K, 1L, 1M, 1N, 1O, 1P, 1Q, where the first VHH or sdAb is depicted in blue, the Fc or IgG is depicted in blue, and the second VHH or sdAb is depicted as red. In various embodiments, both VHH or sdAbs may be fused to the N-termini of the Fc, to the C-termini of the Fc, or one or more VHH or sdAb may be fused to either or both of an N-terminus or C-terminus of the Fc. In a related embodiment, the Wnt surrogate molecule has a hetero-IgG format, whereas one VHH or sdAb is present as a half antibody, and the other is fused to the N-terminus of the Fc or the C-terminus of the Fc. A bispecific but monovalent to each receptor version of this format is depicted in FIG. 1E. In certain embodiments, the VHH or sdAb is fused directly to the other VHH or sdAb, whereas in other embodiments, the binding regions are fused via a linker moiety. In particular embodiments, the VHH or sdAbs are described herein or comprises any of the CDR sets described herein. In various embodiments, any of these formats may comprise one or more scFvs in place of one or more VHH or sdAbs.

[0139] In certain embodiments, a Wnt surrogate molecule is formatted as a diabody. As shown in FIG. 1R, the binders against Fzd and LRP can also be linked together in a diabody (or DART) configuration. The diabody can also be in a single chain configuration. If the diabody is fused to an Fc, this will create a bivalent bispecific format. Without fusion to Fc, this would be a monovalent bispecific format. In certain embodiments, a diabody is a noncovalent dimer scFv fragment that consists of the heavy-chain variable (VH) and light-chain variable (VL) regions connected by a small peptide linker. Another form of diabody is a single-chain (Fv)2 in which two scFv fragments are covalently linked to each other. In particular embodiments, the diabody comprises two or more Fzd binding regions, wherein at least two of the Fzd binding regions bind to different sets of one or more Fzd receptor epitopes.

[0140] In certain embodiments, two or more diabodies, scFvs, and/or VHH or sdAbs can be fused in tandem in a multivalent format, with or without being fused to an Fc (FIG. 1A, 1B, 1F, 1U). In particular embodiments, at least one of the diabodies, scFvs, and/or VHH or sdAbs binds one or more Fzd receptor epitopes, and at least one of the diabodies, scFvs, and/or VHH or sdAbs binds LRP5 and/or LRP6.

[0141] In various embodiments, including but not limited those depicted in FIG. 1G or 1H, a Wnt surrogate molecule comprises two or more Fabs or antigen-binding fragments thereof that each bind a different set of one or more Fzd receptor epitopes, and one or more VHH or sdAbs or antigen-binding fragments thereof (or, alternatively or in combination, one or more scFvs or antigen-binding fragments thereof), e.g., that bind LRP5/6. In certain embodiments, a first Fab specifically binds a first set of one or more Fzd receptor epitopes, a second Fab specifically binds a second, different set of one or more Fzd receptor epitopes, and the VHH or sdAb (or scFv) specifically binds LRP5 and/or LRP6. In certain embodiments, the VHH or sdAb (or scFv) is fused to the N-terminus of the Fabs, while in some embodiments, the VHH or sdAb (or scFv) is fused to the C-terminus of the Fabs. In particular embodiments, the Wnt surrogate molecule has a hetero-Ig format, as depicted in FIG. 1G, 1H, 1AG in which the first and second Fabs are each present as a half antibody, and one or more VHH or sdAbs (or scFvs) are fused to one or more of the N-terminus of the Fc, the N-terminus of the Fab, the C-terminus of the Fc (e.g., FIG. 1Y), or the C-terminus of the Fab. The first and second Fabs may be connected to each other via knobs-into-holes mutations in their respective Fcs, e.g., within the CH3 domain.

[0142] As discussed, Wnt surrogate molecules, in various embodiments, comprise one or more antibodies or antigen-binding fragments thereof disclosed herein. Thus, in particular embodiments, a Wnt surrogate comprises two polypeptides, wherein each polypeptide comprises an VHH or sdAb or scFv that binds LRP5/6 and an VHH or sdAb or scFv that binds one or more Fzd receptor epitopes, optionally wherein one of the binding domains is an scFv and the other is an VHH or sdAb. In particular embodiments, each polypeptide comprises a Fzd binding region that binds a different set of one or more Fzd receptor epitopes. In certain embodiments, a Wnt surrogate comprises three polypeptides, wherein the first polypeptide comprises an antibody heavy chain and the second polypeptide comprises an antibody light chain, wherein the antibody heavy chain and light chain bind LRP5/6 or one or more Fzd receptor epitopes, and wherein the third polypeptide comprises a VHH or sdAb fused to a heavy chain Fc region, wherein the VHH or sdAb binds to either LRP5/6 or one or more Fzd receptor epitopes. In other embodiments, Wnt polypeptides comprise four polypeptides, including two heavy chain polypeptides and two light chain polypeptides, wherein the two heavy chains and two light chains bind LRP5/6 or one or more Fzd receptor epitopes, and further comprise one or more VHH or sdAb or scFv fused to one or more of the heavy chains and/or light chains, wherein the VHH or sdAb or scFv binds to LRP5/6 or one or more Fzd receptor epitopes. In another illustrative embodiment, a Wnt surrogate comprises at least four polypeptides, including two heavy chain polypeptides and two light chain polypeptides that bind either LRP5/6 or one or more Fzd receptor epitopes, wherein the Wnt surrogate further comprises a Fab that binds either LRP5/6 or one or more Fzd receptor epitopes. For example, the Fab may comprise two polypeptides, each fused to one of the two heavy chain polypeptides, and two polypeptides, each fused to one of the two light chain polypeptides, or it may comprise two polypeptides each fused to one of the two heavy chain polypeptides and two additional polypeptides, each bound to one of the two polypeptides fused to the heavy chain polypeptides, thus making a second Fab. Other configurations may be used to produce the Wnt surrogates disclosed herein. In particular embodiments of any of these formats, they comprise at least two or more Fzd binding regions, which each bind to a different set of Fzd receptor epitopes.

[0143] In some embodiments, the differing ratios of Fzd binding regions to LRP binding regions (Fzd:LRP) is represented in FIG. 1AB, 1AC, 1AD, 1AE, 1AF, 1AG, 1AH, 1AI, 1AJ, 1AK, 1AL, 1AM. In particular embodiments, one or more Fabs bind to one or more Fzd receptors or to different epitopes in the same Fzd receptor, and one or more VHH or sdAbs (or scFvs) bind to one or more LRP receptors or different epitopes in the same LRP receptor.

[0144] In particular embodiments, a Wnt surrogate molecule includes a first light chain and first heavy chain forming a first Fzd binding region, and a second light chain and second heavy chain forming a second Fzd binding region, with the first and second Fzd binding regions binding to different sets of one or more Fzd receptor epitopes. In certain embodiments, the first and second heavy chains are connected to each other. For example, the first heavy chain may include a first CH3 domain, the second heavy chain may include a second CH3 domain, and the first and second CH3 domains may be connected to each other, e.g., via knobs-into-holes mutations. In certain embodiments, the first heavy chain and/or the second heavy chain comprise an amino acid sequence having at least 90%, at least 95%, at least 98%, or at least 99% identity to any of the sequences set forth in SEQ ID NOs:110, 112, 114, 116, 118, 120, and 122. In certain embodiments, the first light chain and/or the second light chain comprise an amino acid sequence having at least 90%, at least 95%, at least 98%, or at least 99% identity to any of the sequences set forth in SEQ ID NOs:109, 111, 113, 115, 117, 119, and 121. In some embodiments, one or more heavy chain comprises an amino acid sequence having at least 90%, at least 95%, at least 98%, or at least 99% identity to any of the sequences disclosed in Table 5. In some embodiments, one or more light chain comprises an amino acid sequence having at least 90%, at least 95%, at least 98%, or at least 99% identity to any of the sequences disclosed in Table 5.

[0145] In certain embodiments, the Wnt surrogate molecule includes a first LRP5/6 binding region and/or a second LRP5/6 binding region, each of which may be or include a Fab or scFv. The first and second LRP5/6 binding regions may bind to the same epitope within LRP5/6, or may bind to different epitopes within LRP5/6. The first LRP5/6 binding region may be fused to an N-terminus of the first light chain, a C-terminus of the first light chain, an N-terminus of the first heavy chain, or a C-terminus of the first heavy chain. The second LRP5/6 binding region may be fused to an N-terminus of the second light chain, a C-terminus of the second light chain, an N-terminus of the second heavy chain, or a C-terminus of the second heavy chain.

[0146] In particular embodiments, a Wnt surrogate molecule comprises an Fzd binding region, e.g., an anti-Fzd antibody, or antigen-binding fragment thereof, fused or bound to a polypeptide that specifically binds to one or more Fzd receptors. In particular embodiments, the polypeptide that specifically binds to one or more Fzd receptors is an antibody or antigen-binding fragment thereof. In certain embodiments, it is an antibody or antigen-binding fragment thereof disclosed herein or in U.S. Provisional Patent Application No. 62/607,877, titled, “Anti-Frizzled antibodies and Methods of Use,” Attorney Docket No. SRZN-004/00US, filed on Dec. 19, 2017, which is incorporated herein by reference in its entirety.

[0147] In particular embodiments, at least one Fzd binding region of a Wnt surrogate molecule includes one or more antigen-binding fragments of an antibody. For example, the one or more antigen-binding fragments may be or be derived from an IgG, scFv, Fab, or VHH or sdAb. In certain embodiments, the one or more antigen-binding fragments are humanized.

[0148] In particular embodiments, the Fzd binding region comprises the three heavy chain CDRs and/or the three light chain CDRs disclosed for any of the illustrative antibodies or fragments thereof that bind to one or more Fzd receptors provided in Table 1A. In particular embodiments, the Fzd binding region comprises the three heavy chain CDRs and/or the three light chain CDRs disclosed for any of the illustrative antibodies or fragments thereof that bind to one or more Fzd receptors provided in Table 1A, wherein the CDRs collectively comprise one, two, three, four, five, six, seven, or eight amino acid modifications, e.g., substitutions, deletions, or additions. In certain embodiments, the Fzd binding region is a VHH or sdAb or was derived from a VHH or sdAb, so Table 1A only includes the three heavy chain CDRs. In particular embodiments, the Fzd binding region comprises the three CDR HC sequences provided in Table 1A or variants wherein the CDRs collectively comprise one, two, three, four, five, six, seven or eight amino acid modifications.

[0149] In particular embodiments, the Fzd binding region comprises the heavy chain fragment and/or light chain fragment of any of the illustrative antibodies or fragments thereof that bind to one or more Fzd receptors provided in Table 1B or SEQ ID NOs:1-73 (or an antigen-binding fragment or variant of either). In certain embodiments, the Fzd binding region is a Fab or was derived from a Fab, so the heavy chain of Table 1B includes VH and CH1 sequences, but not CH2 or CH3 sequences. In certain embodiments, the Fzd binding region is a VHH or sdAb or was derived from a VHH or sdAb, so Table 1B includes the VHH domain. In certain embodiments, the Fzd binding region is a polypeptide, e.g., an antibody or antigen-binding fragment thereof, that competes with any of these antibodies for binding to one or more Fzd receptors.

[0150] In particular embodiments, the Fzd binding region includes an amino acid sequence having at least 90%, at least 95%, at least 98%, or at least 99% identity to any of the sequences set forth in Table 1A, Table 1B, or SEQ ID NOs: 1-73, or an antigen-binding fragment thereof. Binding characteristics of clones listed in Table 1B were determined and are shown in Table 1B. Heavy chain CDRs are designated CDRH1, CDRH2 and CDRH3, and light chain CDRs are designated CDRL1, CDRL2, and CDRL3.

TABLE 1A
Anti-Fzd Antibody Clone IDs and CDR sequences

| | Initial | | SID | | SID | | SID |
|---|---|---|---|---|---|---|---|
| Clone ID | Binding | CDRH1 | NO. | CDRH2 | NO. | CDRH3 | NO. |
| 001S-A01 | Fzd1 | YTFTSYGIS | 391 | GWISAYNGNTNYA | 570 | CARASAWTPYGAFDIW | 752 |
| 001S-B01 | Fzd1 | GSISSGGYSWS | 283 | GSIYHSGSTYYN | 547 | CARFYYDILTGYSYFDYW | 818 |
| 001S-E01 | Fzd1 | GSISNYYWS | 282 | GEIDRSGDTNYN | 488 | CARVRARRFLVSDRSAF | 945 |
| | | | | | | DIW | |
| 001S-F01 | Fzd1 | GSISGNNYYZG | 281 | GSIYFTGGTYYN | 546 | CARVMLITDAFDIW | 942 |
| 001S-G01 | Fzd1 | GSISSSSYYWG | 285 | GYIYYSGSTYYN | 589 | CARATYGGDAFDIW | 760 |
| 001S-H01 | Fzd1 | GSISSGGYYWS | 284 | GYIYYSGSTYYN | 589 | CARHAGFYGLADYFDY | 875 |
| | | | | | | W | |
| 001S-A02 | Fzd1 | GSISSGGYYWS | 284 | GYIYYSGSTYYN | 589 | CARGKGYSYGYGKDWF | 845 |
| | | | | | | DPW | |
| 001S-E02 | Fzd1 | GSISGNNYYWG | 280 | GSIYFTGGTYYN | 546 | CARVMLITDAFDIW | 942 |
| 001S-G02 | Fzd1 | GAISGTSYFWG | 266 | GSIYYTGNTYYN | 548 | CARIGIAVAAPVDHW | 882 |
| 001S-H02 | Fzd1 | GSISSSSYYWG | 285 | GYIYYSGSTYYN | 589 | CARATYGGDAFDIW | 760 |
| 001S-A03 | Fzd1 | GSISSGGYYWS | 284 | GYIYYSGSTYYN | 589 | CARVRDYYDSSGYYYDY | 946 |
| | | | | | | FDYW | |
| 001S-B03 | Fzd1 | ASFSGHYWT | 158 | GEIDHTGSTNYE | 487 | CARGGQGGYDWGHYH | 835 |
| | | | | | | GLDVW | |
| 001S-H08 | Fzd5 | RAFTDNVMA | 329 | ATISGGGGSTFDD | 466 | CAAASSLTSTPYDLW | 678 |
| 001S-A09 | Fzd5 | RSFRTNALG | 333 | AAISWTGGSTYYA | 422 | CNTVTYTGGSYKNYW | 1005 |
| 001S-B09 | Fzd5 | SIDSINAMA | 356 | AALTSGGITYHA | 428 | CNVITIVRGMGPRAYW | 1006 |
| 001S-C09 | Fzd5 | SIFSINAMG | 357 | ATIQSGGRTNYA | 465 | CNVITIVRGMGPRAYW | 1006 |
| 001S-C07 | Fzd8 | YTFTSYGIS | 391 | GWISAYNGNTNYA | 570 | CARDGTPFYSGSYYGSW | 772 |
| 001S-D07 | Fzd8 | GTFSSYAIS | 295 | GRIIPILGIANYA | 529 | CARVPTSPYDILTGPFDY | 944 |
| | | | | | | W | |
| 001S-E07 | Fzd8 | ASVSSNSAAWN | 159 | GRTYYRSKWYNDYA | 542 | CARWKNYFDPW | 953 |
| 001S-H07 | Fzd8 | FTFSSYAMS | 228 | STISGGGGSTYYA | 646 | CAKDLVPWGSSAFNIW | 704 |
| 004S-E05 | Fzd5 | FTFSTYEMN | 243 | SGVSWNGSRTHYV | 618 | CARGQSEKWWSGLYG | 856 |
| | | | | | | MDVW | |
| 004S-E03 | Fzd5 | GTFSTYAIS | 298 | GWINSGNGNTKYS | 565 | CWTGLLWFGESTDAFDI | 1031 |
| | | | | | | W | |
| 004S-G06 | Fzd5 | GTFTYRYLH | 307 | GGIIPIFGTGNYA | 501 | CASSMVRVPYYYGMDV | 964 |
| | | | | | | W | |
| 001S-D09 | Fzd8 | GPFNLFAMG | 272 | AGISRTGGNTGYA | 445 | CASKTTINSGWSREYHY | 958 |
| | | | | | | W | |
| 001S-E09 | Fzd8 | GPFNLFAMG | 272 | AGISRTGGNTGYA | 445 | CASKTTINSGWSREYHY | 958 |
| | | | | | | W | |
| 001S-F09 | Fzd8 | GFFSSFTMG | 268 | AAISRNGVYTRFA | 409 | CNALAPGVRGSW | 987 |
| 001S-G09 | Fzd8 | SLFRLNGMG | 360 | ATISTRGTTHYA | 467 | CTDEESW | 1011 |
| 001S-H09 | Fzd8 | GPFNLLAMG | 273 | AGISRTGGNTGYA | 445 | CASKTTINSGWSREYHY | 958 |
| | | | | | | W | |
| 001S-A10 | Fzd8 | SVVNFVVMG | 364 | AAITSGGSTNYA | 425 | CNRVGSREYSYW | 1001 |
| 001S-B10 | Fzd8 | RTSDLYTMG | 352 | AAIGYKVKWNGERT | 404 | CNAVTYNGYTIW | 994 |
| | | | | | | YYL | |
| 001S-G12 | Fzd1 | SIFSSNTIY | 359 | ALITTSGNTNYA | 455 | CNAGAPAWTYRMGTYY | 986 |
| | | | | | | PQFGSW | |
| 002S-A01 | Fzd1 | STFSTYAMG | 362 | AAISGSGENTYYA | 408 | CVKFGMNLGYSGYDYW | 1028 |
| 002S-B01 | Fzd1 | STFSNYAMG | 361 | AAISWGGGSTFYS | 411 | CAAGPIARWYRGDMDY | 681 |
| | | | | | | W | |
| 002S-C01 | Fzd1 | RMFSNYAMG | 331 | AAISSGGSGTYYS | 410 | CAAGPIARWYRGDMDY | 681 |
| | | | | | | W | |
| 002S-D01 | Fzd1 | RTDGGYVMG | 337 | ATVTWRTGTTYYA | 469 | CAAGPIARWYRGDMDY | 681 |
| | | | | | | W | |
| 002S-E01 | Fzd1 | RTFSSAAMG | 345 | AAISWSGSTAYYA | 421 | CATLTPYGTVASY | 974 |
| 002S-F01 | Fzd1 | RTFSSYAMG | 347 | AAVNWSGGSTYYA | 430 | CAAVFLSRNYEIQEYYRY | 689 |
| | | | | | | Q | |
| 002S-G01 | Fzd1 | RTFSSYAMG | 347 | AAISWSGGSTYYA | 418 | CAAGPIARWYRGDMDY | 681 |
| | | | | | | W | |
| 002S-H01 | Fzd1 | RSFSTYPMG | 336 | TVISGSGGSTYYS | 676 | CAAGPIARWYRGDMDY | 681 |
| | | | | | | W | |
| 002S-A02 | Fzd1 | RRFTTYGMG | 332 | AAVTWRSGSTYYA | 436 | CYLEGPLDVYW | 1032 |
| 002S-B02 | Fzd1 | RTFNRHVMG | 341 | AAISWSGDSTYYA | 415 | CAKLGGSSWLREYDYW | 724 |
| 002S-C02 | Fzd1 | RTFRAYAMG | 342 | SAISWSGGSTYYA | 603 | CAAGPIARWYRGDMDY | 681 |
| | | | | | | W | |
| 002S-D02 | Fzd1 | RTFSEYAMG | 343 | AAISWSGGSTHYA | 417 | CNADSLRGIDYW | 984 |
| 002S-E02 | Fzd1 | FTFREYAMT | 199 | SGISRDGGRTSYS | 613 | CAPRVLVTAPSGGMDY | 734 |
| | | | | | | W | |
| 002S-F02 | Fzd1 | GDFTNYAMA | 267 | AAVNWRGDGTYYS | 429 | CAAVFLSRNYEIQEYYRY | 689 |
| | | | | | | Q | |
| 002S-G02 | Fzd1 | RTFGTWAMG | 340 | AAISYNGFSTYYS | 424 | CAAGPIARWYRGDMDY | 681 |
| | | | | | | W | |
| 002S-H02 | Fzd1 | RTFSSYAMG | 347 | AAISWSGGSTYYA | 418 | CAAGPIARWYRGDMDY | 681 |
| | | | | | | W | |
| 002S-D03 | Fzd1 | RTFGSYAMG | 339 | AAISWSGGSTYYA | 418 | CAAGPIARWYRGDMDY | 681 |
| | | | | | | W | |
| 002S-E03 | Fzd1 | SIFSIYAMG | 358 | AVVATGGATNYA | 481 | CNMRGNWYREGRPAEF | 1000 |
| | | | | | | LSW | |
| 002S-F03 | Fzd1 | RTSSSYAMG | 353 | AAISWSGGSTYYA | 418 | CAAGPIARWYRGDMDY | 681 |
| | | | | | | W | |
| 002S-G03 | Fzd1 | RTFGSYAMG | 339 | AAISWSGGSTYYA | 418 | CAAGPIARWYRGDMDY | 681 |
| | | | | | | W | |
| 002S-H03 | Fzd1 | QTFTAYAMG | 327 | AAISWSGSATHYA | 420 | CNAWVLVAGSRGTSAD | 996 |
| | | | | | | YW | |
| 002S-A04 | Fzd1 | RTFSSYAMG | 347 | AAISWSGRSTYYA | 419 | CAAGPIARWYRGDMDY | 681 |
| | | | | | | W | |
| 002S-B04 | Fzd1 | RTFSSYAMG | 347 | AAISWSGGSTYYA | 418 | CAAGPNYSWFMPSSSRL | 682 |
| | | | | | | IW | |
| 002S-C04 | Fzd1 | RRFTTYGMG | 332 | AAVTWRAGSTYYA | 435 | CSADKLDYLDDQPFKTW | 1010 |
| | | | | | | DYW | |
| 002S-D04 | Fzd1 | GTSSTYAMG | 309 | AAINRSGGSTYYA | 405 | CAAVFLSRNYEIQEYYRY | 689 |
| | | | | | | Q | |
| 002S-E04 | Fzd1 | GTFSTYAMG | 300 | AAISWSGDSTYYL | 416 | CAAGPIARWYRGDMDY | 681 |
| | | | | | | W | |
| 004S-H04 | Fzd5 | GTFSSYAIS | 295 | GWISTYNGATNYA | 577 | CARGGAGRFGEGMDV | 826 |
| | | | | | | W | |
| 001S-A04 | Fzd5 | YTFTSYGIS | 391 | GWISAYNGNTNYA | 570 | CASSKEKATYYYGMDV | 963 |
| | | | | | | W | |
| 001S-D03 | Fzd5 | GTFSSYAIS | 295 | GRIIPILGIANYA | 529 | CARLDPGYYYGMDVW | 886 |
| 001S-F03 | Fzd5 | GTFSSYAIS | 295 | GGIIPIFGTANYA | 499 | CARVIFSTVTTTNDIW | 939 |
| 004S-E04 | Fzd5 | YTFSGYYLH | 374 | GTVTPILGTANYA | 549 | CARVDGSGYYGIDYW | 933 |
| 004S-A06 | Fzd5 | GSFSNYAIS | 278 | GRIIPILGSANYA | 530 | CARTYLKAFDIW | 930 |
| 004S-F04 | Fzd5 | YTFTNNFMH | 383 | GRINPNSGGTNYA | 537 | CARDRFDNWFDPW | 788 |
| 001S-C03 | Fzd5 | GTFSSYAIS | 295 | GRIIPILGIANYA | 529 | CAREGRSRVYGGNSFDY | 808 |
| | | | | | | W | |
| 003S-A01 | Fzd1 | YIFTDYYMH | 368 | GGIIPIFGTANYA | 499 | CARMSSDYYDSSGYYRR | 895 |
| | | | | | | GMDVW | |
| 003S-E01 | Fzd1 | YIFTDYYMH | 368 | GGIIPIFGTANYA | 499 | CARAWKGLWFGEGTFD | 761 |
| | | | | | | YW | |
| 003S-F01 | Fzd1 | GTFSSYAIS | 295 | GWINAGNGNTTYA | 558 | CARLAFDIW | 885 |
| 003S-A02 | Fzd1 | YTFTGYYMH | 379 | GWINAGNGNTTYA | 558 | CAKDRGNYGDYLDYW | 707 |
| 003S-C02 | Fzd1 | FTFSNSDMN | 214 | ALISYDGSHTYYA | 454 | CTRGSRIGWFDPW | 1015 |
| 003S-E02 | Fzd1 | GTFSSYTIS | 296 | GGIIPISGKTDYA | 505 | CARARGGDSPLSL | 749 |
| 003S-F02 | Fzd1 | GTFRSYAIN | 292 | GGIIPIFGTANYA | 499 | CARGGWRPDYYGSGSY | 840 |
| | | | | | | YSFDYW | |
| 003S-G02 | Fzd1 | FTFGTYWVT | 196 | SGITGSGGRTFYA | 616 | CARMKDWFGAFDIW | 894 |
| 003S-0O3 | Fzd1 | FTFSRYAMS | 220 | SYISGDSGYTNYA | 658 | CARGLVIATNWFDPW | 849 |
| 003S-D03 | Fzd1 | YTFTSYYMH | 392 | GWINTYNGNTNYP | 567 | CAESLTSTADW | 691 |
| 003S-E03 | Fzd1 | YIFTDYYMH | 368 | GWVNPTTGNTGYA | 586 | CARNVEGATSFPEFDYW | 898 |
| 003S-H03 | Fzd1 | GTFSSYAIS | 295 | GGIIPIFGTANYA | 499 | CAKDIGSSWYYYMDVW | 701 |
| 003S-A04 | Fzd1 | FTFGTYWVT | 196 | SGITGSGGRTFYA | 616 | CARMKDWFGAFDIW | 894 |
| 003S-C04 | Fzd1 | FAVSSSYMS | 168 | ASIWFDGSNQDYA | 463 | CAPNESGNVDYW | 733 |
| 003S-D04 | Fzd1 | FTFSSYAMH | 227 | SAISGSGGSTYYA | 600 | CARDHGSSWYQNTDAF | 774 |
| | | | | | | DIW | |
| 003S-G04 | Fzd1 | FRFISHPIH | 177 | GRVIPILGVTNYA | 545 | CASSSDYGDYLKEPNYG | 966 |
| | | | | | | MDVW | |
| 003S-D05 | Fzd2 | FTFSNYAMT | 216 | SAIGTGGGTYYA | 595 | CATAYRRPGGLDVW | 969 |
| 003S-E05 | Fzd2 | FTFSSYTMS | 236 | GRIKSKANGGTTDYA | 535 | CARGSSSWYDW | 863 |
| 003S-A06 | Fzd2 | FTFADYGMH | 188 | SYISSGSYTIYYS | 659 | CARGTFDWLLSPSYDYW | 865 |
| 003S-C06 | Fzd2 | FTFSNYGMH | 217 | SAISNSGGSTYYA | 601 | CTSSFLTGSQPSGYW | 1018 |
| 003S-G06 | Fzd2 | FTFSDYGMH | 207 | SSTSGSGGNSKYS | 642 | CARHNPGYMGYYYGM | 877 |
| | | | | | | DVW | |
| 003S-H06 | Fzd2 | GTFSSYTIS | 296 | GLVDPEDGETIYA | 520 | CTILPAAAAGTYYYYGM | 1012 |
| | | | | | | DVW | |
| 003S-B07 | Fzd2 | FTFSDHYMS | 205 | SSITRTPSGGTTEYA | 639 | CARDGGYW | 768 |
| 003S-D07 | Fzd2 | YTFTNNFMH | 383 | GIINPSGGSTSYA | 513 | CARATSLGRRYCSSTSCY | 759 |
| | | | | | | PRDAFDIW | |
| 003S-E07 | Fzd2 | YTFTNNFMH | 383 | GWINPNSGGTKYA | 563 | CARSVGEVGATMLGIGV | 926 |
| | | | | | | WYWFDPW | |
| 003S-A08 | Fzd2 | FTFSNYAMT | 216 | SAIGTGGGTYYA | 595 | CATAYRRPGGLDVW | 969 |
| 003S-C08 | Fzd2 | LTVSTNFMS | 324 | AGIGWDSTNIGYA | 440 | CARDLVAARPSNWDYW | 782 |
| 003S-E08 | Fzd2 | FTFRNSAMH | 201 | STISGSGGSTYYS | 647 | CARGGGYSSSW | 829 |
| 003S-G09 | Fzd4 | FTFDHNPMN | 194 | SAIGAGGGTYYA | 593 | CASPTVTRR | 960 |
| 003S-C10 | Fzd4 | GTFSSYAIS | 295 | GWINAGNGNTTYA | 558 | CARHYYGSGSYPDW | 880 |
| 003S-D10 | Fzd4 | FNFG1Y5MT | 172 | SYISGDSGYTNYA | 658 | CARVGPGGWFDPW | 936 |
| 003S-E10 | Fzd4 | FTFSSYAMH | 227 | AGISASGGSTYYA | 442 | CARPSTTGTKAFDIW | 901 |
| 003S-A11 | Fzd4 | GTFSSYAIS | 295 | GWINAGNGNTTYA | 558 | CARHYYGSGSYPDW | 880 |
| 003S-G11 | Fzd4 | GTFSSYAIS | 295 | GRIIPIFGTVNYA | 528 | CARGARLDYW | 820 |
| 003S-H11 | Fzd4 | YTFTGYYMH | 379 | GGIIPIFGTPHYA | 502 | CASTDPSSGLDYW | 967 |
| 003S-C12 | Fzd4 | GTFSSYAIS | 295 | GWINPNSGGTNYA | 564 | CARGGSSDVR | 838 |
| 003S-F12 | Fzd4 | FTFSSYAMH | 227 | SVISTSGDTVLYT | 652 | CARGGSSDVR | 838 |
| 004S-B01 | Fzd4 | GTFSSYAIS | 295 | GIINPSGGSTSYA | 513 | CAKDGVVR | 698 |
| 004S-C01 | Fzd4 | FTFSNHYTS | 213 | STISSSGGRTFYA | 650 | CARASRIDGGWPIIDHL | 754 |
| 004S-D01 | Fzd4 | FTFTNYAMS | 248 | SAISGSGGSTYYA | 600 | CARATGFGTVVFDYW | 757 |
| 004S-E01 | Fzd4 | GTFSSYAIS | 295 | GWINAGNGNTTYA | 558 | CARHYYGSGSYPDW | 880 |
| 004S-F01 | Fzd4 | GTFSSYAIS | 295 | GWINAGNGNTTYA | 558 | CARDGVE | 773 |
| 004S-H01 | Fzd4 | FTFSNYAMH | 215 | ALMSPDGTIIYYA | 456 | CAKGIVGDYGAFDIW | 717 |
| 004S-B02 | Fzd4 | FTFSSYGMH | 230 | SSINNSSRTVFYA | 630 | CAKDHLAVADAHGR | 700 |
| 004S-E02 | Fzd4 | FTFSSYAMH | 227 | AVISYDGSNEYYA | 474 | CAGGEVYEL | 692 |
| 004S-F02 | Fzd4 | FTFSTYAMH | 242 | AVISSDGNNKYYT | 473 | CAAPDVVVTADGYYW | 685 |
| 004S-G02 | Fzd4 | FTFANYAMN | 190 | ALISYDGGTKYYA | 453 | CAKTLVTSHALHIW | 728 |
| 004S-H02 | Fzd4 | FTFANYAMH | 189 | ALISYDGGNKYYA | 452 | CAKTLVTSHALHIW | 728 |
| 001S-E03 | Fzd5 | GSFSGYYWH | 276 | GEINHSGSTNYN | 489 | CARGRRLVRFTVTSAFDI | 858 |
| | | | | | | W | |
| 001S-B05 | Fzd5 | GTFSSYAIS | 295 | GGIIPILGIANYA | 504 | CARIPKPRGYSYGDNGS | 883 |
| | | | | | | W | |
| 004S-A07 | Fzd6 | GNFKNYGIT | 271 | GRIIPALGTANYA | 525 | CARQYCSGGSCYPDAFDI | 908 |
| | | | | | | R | |
| 004S-B07 | Fzd6 | FTFSSYSMN | 233 | GVISKDGDNKYYA | 553 | CASSRDGYNRLAFDIW | 965 |
| 004S-A08 | Fzd6 | GTFSSYAIS | 295 | GRIIPILGIANYA | 529 | CARDGGDYGMDVW | 767 |
| 004S-B08 | Fzd6 | YTFTNNFMH | 383 | GRINPNSGGTNYA | 537 | CASQNYYGSGSYPGFDY | 961 |
| | | | | | | W | |
| 004S-D08 | Fzd6 | YTFTYRYLH | 394 | GGIIPIFGTANYA | 499 | CATHDSSGYYSFDYW | 973 |
| 004S-E08 | Fzd6 | FSVSSNYMN | 187 | SAIGTGGGTYYA | 595 | CTTRTYDSSGYYETQNYY | 1024 |
| | | | | | | MDVW | |
| 004S-G08 | Fzd6 | FTFSDYYMS | 208 | AAISYDESNKFYA | 423 | CARSAVAGAFDIW | 916 |
| 004S-A09 | Fzd6 | FTFRDYAMN | 198 | SGISWNSGSIGYA | 615 | CARRSGYSGSVYYYYGM | 913 |
| | | | | | | DVW | |
| 004S-B09 | Fzd6 | FTFSSFGMH | 221 | AGINWNGGSVVYA | 441 | CARGPSHQHTFDIW | 854 |
| 004S-C09 | Fzd6 | YTFTNNFMH | 383 | GGFDPEDGETIYA | 492 | CARVGRGYSFDYW | 937 |
| 004S-E09 | Fzd6 | DTFSNYVIS | 163 | GRISAYNGYKSYA | 538 | CARSSGYVGWFDPW | 924 |
| 004S-F09 | Fzd6 | FTFSNYYTS | 218 | SYISGAGGSTEYA | 657 | CARLPRRSGKGSAFDIW | 888 |
| 004S-H09 | Fzd6 | GTFSSYTIS | 296 | GWMNPNSGNTGYA | 583 | CARVGATSAGGMDVW | 935 |
| 004S-C10 | Fzd6 | YIFTDYYMH | 368 | GLVDPEDGETIYA | 520 | CAHSDFFSGLSFGDW | 693 |
| 004S-D10 | Fzd6 | FTFSNSDMN | 214 | SSISTSGGSTYYA | 637 | CARGSYW | 864 |
| 004S-E10 | Fzd6 | TTLNKYAIS | 365 | GRITPVVGVTNYA | 539 | CALSSSWYGGFDYW | 731 |
| 004S-F10 | Fzd6 | GFTFSDHY | 269 | ALVGYDGSQQFYG | 458 | CNTGIPMLYW | 1003 |
| 004S-G10 | Fzd6 | FTFSDYYMS | 208 | SAISGSGFTYYA | 599 | CARVSRGFAFDYW | 948 |
| 004S-A11 | Fzd6 | GTFSSYAIS | 295 | GRIIPILGIANYA | 529 | CARESVNNYYYMDVW | 813 |
| 004S-C11 | Fzd6 | FTFSSYAMH | 227 | ALTSYDGSKKFYA | 457 | CAKTGRGYAFDIW | 726 |
| 004S-E11 | Fzd6 | FTFSSYNMN | 232 | GRIKSKANGGTTDYA | 535 | CAKAGQQLDW | 696 |
| 004S-H11 | Fzd6 | FTFTSSAMQ | 249 | GGIIPIFGTANYA | 499 | CATVQTNYYDSSGRFSY | 977 |
| | | | | | | RAHYFDYW | |
| 004S-A12 | Fzd6 | YTFTNNFMH | 383 | GRINPNSGGTNYA | 537 | CARGQGYSSGWYRGDA | 855 |
| | | | | | | FDIW | |
| 004S-D12 | Fzd6 | FAFDDYAMH | 165 | GFIRSKAYGGTTEYA | 490 | CAKDRGYSSGWYLDYW | 708 |
| 005S-H01 | Fzd7 | FNFSSYTMR | 173 | SVIYGGGNTNYA | 653 | CARGGSGGNLSYW | 836 |
| 005S-A02 | Fzd7 | GTFSSYAIS | 295 | GMIIPFLGITNYA | 521 | CTRPYDAFDIW | 1016 |
| 005S-C02 | Fzd8 | YTFASYGMH | 373 | GWINAGNGNTTYA | 558 | CARLSVWKWEQVTNWF | 890 |
| | | | | | | DPW | |
| 005S-E02 | Fzd8 | GTFTSYAIS | 305 | GWINAGNGNTKYS | 557 | CTTGLFPYYRYNWNNDA | 1022 |
| | | | | | | FDIW | |
| 005S-A03 | Fzd8 | GTFSSYAIS | 295 | GWMNPNSGNTGYA | 583 | CAKWHIGATGNWFDP729 | |
| | | | | | | W | |
| 005S-H03 | Fzd8 | YTFTNNFMH | 383 | GGIFPIYGISTYA | 494 | CARDRPTSSWYAFDYW | 792 |
| 005S-F04 | Fzd8 | FSFSSTAMS | 181 | SYISSSGSITHYA | 670 | CARYGDYGDYW | 954 |
| 005S-H04 | Fzd8 | YTFTNNFMH | 383 | GWINAGNGNTTYA | 558 | CARVATGNAFDIW | 932 |
| 005S-B05 | Fzd8 | FTFSSYWMH | 239 | AGISGSGKTTFYA | 444 | CARGGLLFDYW | 831 |
| 005S-F05 | Fzd8 | FTFTSSAVQ | 251 | GWMNPNSGNTGYA | 583 | CARRTAVAGTIDYW | 914 |
| 005S-G05 | Fzd8 | GTFSSYAIS | 295 | GWISPYNGNTNYA | 573 | CARGGWTNYGGNLDY | 841 |
| | | | | | | W | |
| 005S-H05 | Fzd8 | YTFTSYYMH | 392 | GRINPNSGGTNYA | 537 | CARVPDFWSGYLDYW | 943 |
| 005S-D06 | Fzd8 | YTFTYRYLH | 394 | GGIIPIFGTANYA | 499 | CARDSYPYGMDVW | 800 |
| 005S-F06 | Fzd8 | GTFSSYAIS | 295 | GRVIPILGVTNYA | 545 | CAREYLGSFDIW | 815 |
| 005S-A07 | Fzd9 | FTFTGSAVQ | 247 | GGILPIYGTTKYA | 509 | CARGARLYGFDYW | 822 |
| 005S-B07 | Fzd9 | FTFTSSAVQ | 251 | GWMNPNSGNTGYA | 583 | CARGRGQQWLTGYYG | 857 |
| | | | | | | MDVW | |
| 005S-C07 | Fzd9 | FTFSSYSMN | 233 | SYIENDGSITTYA | 654 | CARAPYYYGSGSLFRLDY | 748 |
| | | | | | | W | |
| 005S-D07 | Fzd9 | GTFNSYAIA | 291 | GGIIPIFGTANYA | 499 | CARAGSGYYNFDYW | 740 |
| 005S-F07 | Fzd9 | FSFSSYGMH | 182 | AYINSRGSLMYYA | 483 | CAKTKLPIW | 727 |
| 005S-G07 | Fzd9 | GSFSGYAIN | 274 | GGIIPIFGTANYA | 499 | CATGYYYDYYFDYW | 972 |
| 005S-H07 | Fzd9 | GTFTNNFMH | 303 | GLVDPEDGETIYA | 520 | CARTYRIVGATPRYYYYG | 931 |
| | | | | | | MDVW | |
| 005S-B08 | Fzd9 | YIFTDYYMH | 368 | GWINPNSGGTIYA | 562 | CARGPRDSGYYPGGAFD | 853 |
| | | | | | | IW | |
| 005S-D08 | Fzd9 | FAFSSHWMH | 166 | SAIDGSGGSTYYA | 592 | CARDRQLGWAHWYFDL | 794 |
| | | | | | | W | |
| 005S-G08 | Fzd9 | YTFTGYYMH | 379 | GWINAGNGNTTYA | 558 | CARDRDYW | 787 |
| 005S-C09 | Fzd9 | FTFSSYGMH | 230 | SAIGTGGGTYYA | 595 | CALLVGAARGISYYYYYG | 730 |
| | | | | | | MDVW | |
| 005S-D09 | Fzd9 | YTFTSYAMH | 389 | GWINAGNGNTTYA | 558 | CARDRPYSSGWYYPAFD | 793 |
| | | | | | | IW | |
| 005S-E09 | Fzd9 | FNLRRYNMN | 175 | SRISNSGSLVYYA | 627 | CARDADSSGYYRYDAFDI | 762 |
| | | | | | | W | |
| 005S-A10 | Fzd9 | YTFTDYYMH | 376 | GIINPSGGSTSYA | 513 | CARHVYGSGTYNNWFD | 878 |
| | | | | | | PW | |
| 005S-D10 | Fzd9 | YTFTSYYMH | 392 | GWMSPNSANTGYA | 583 | CARGGPIHYYYYYYMDV | 834 |
| | | | | | | W | |
| 005S-H10 | Fzd9 | GAFSTSSIS | 265 | GRIIPVLGTANYA | 534 | CAKGGWRSSFDPW | 715 |
| 005S-B11 | Fzd9 | YTFTSYDIN | 390 | GGFDPEDGETIYA | 492 | CAKAGDWGLYGMDVW | 695 |
| 005S-C11 | Fzd9 | FTFTGSAVQ | 247 | GGILPIYGTTKYA | 509 | CARGARLYGFDYW | 822 |
| 005S-D11 | Fzd9 | YTFTNNFMH | 383 | GWINPNSGDTKFA | 561 | CAREANYDILTGYIRPDA | 806 |
| | | | | | | FDIW | |
| 005S-E11 | Fzd9 | GTFSSYAIS | 295 | GWINAGNGNTKYS | 557 | CTTTEYSSSPDYYYGMD | 1025 |
| | | | | | | VW | |
| 005S-G11 | Fzd9 | GTFTRNSIS | 304 | GGIIPIFGTANYA | 499 | CARSSDLRIFDYW | 922 |
| 005S-H11 | Fzd10 | YTFASYDIH | 372 | GWINAGNGNTTYA | 558 | CARDGIWDIFDYW | 769 |
| 005S-E12 | Fzd10 | YIFTDYYMH | 368 | GVIFPVYPTPDYA | 551 | CARGGSTGYYGMDVW | 839 |
| 005S-F12 | Fzd10 | GTFSSYAIS | 295 | GRIVPIVDVVKYA | 541 | CARDTCSSTSCSPDYW | 801 |
| 006S-A01 | Fzd10 | FTFSSYSMN | 233 | SAIGTGGGTYYA | 595 | CAREGWFGESPFGMDV | 810 |
| | | | | | | W | |
| 006S-F01 | Fzd10 | YTFTRYAVH | 385 | GWISTFNDNTNYA | 576 | CASPTGMTTNFDYW | 959 |
| 006S-H01 | Fzd10 | YIFTDYYMH | 368 | GGIIPIFGTANYA | 499 | CAKGSYYYDSSGYYWDA | 723 |
| | | | | | | FDIW | |
| 006S-A02 | Fzd10 | YIFTDYYMH | 368 | GGIIPLFGTTDYA | 507 | CARDITGADGMDVW | 775 |
| 006S-D02 | Fzd10 | GTFSSYAIS | 295 | GRIIPTVGTANYA | 533 | CARDVCSGGSCSPDVW | 802 |
| 006S-E02 | Fzd10 | FTFTSSATQ | 250 | GGIIPIFGTANYA | 499 | CARDGSSGWYSPNAFDI | 770 |
| | | | | | | W | |
| 006S-H02 | Fzd10 | FTFRMYGMH | 200 | SRISPDGRTTTYA | 628 | CARSPRWYDAFDIW | 920 |
| 006S-A03 | Fzd10 | YIFTDYYMH | 368 | GWINAGNGNTTYA | 558 | CARDPIMFGDQPGWFD | 784 |
| | | | | | | PW | |
| 006S-B03 | Fzd10 | GTFSSYAIS | 295 | GWINAGNGNTKYA | 556 | CAREGYDFWSGPYAFDI | 811 |
| | | | | | | W | |
| 006S-C03 | Fzd10 | GTFSSNVIS | 293 | GGIIPIFGTANYA | 499 | CARGGYYYGMDVW | 843 |
| 014S-B01 | Fzd1 | YIFTDYYMH | 368 | GGIIPIFGTANYA | 499 | CARMSSDYYDSSGYYRR | 895 |
| | | | | | | GMDVW | |
| 014S-D01 | Fzd4 | GTFSSYAIS | 295 | GWINAGNGNTTYA | 558 | CARHYYGSGSYPDW | 880 |
| 014S-E01 | Fzd4 | GTFSSYAIS | 295 | GWINAGNGNTTYA | 558 | CARHYYGSGSYPDW | 880 |
| 014S-G01 | Fzd4 | GTFSSYAIS | 295 | GWMNPNNGNTTYA | 581 | CARHYYGSGNYRDW | 879 |
| 014S-A02 | Fzd4 | FTFSSNAMH | 223 | SGISGSGGSTYYA | 608 | CAKPGIAAAGTNNWFD | 725 |
| | | | | | | PW | |
| 014S-B02 | Fzd4 | FTFSSYAMH | 227 | SGISGSGSSTYYA | 611 | CARPSTTSFGMDVW | 902 |
| 014S-C02 | Fzd5 | YTFTSYYMH | 392 | GRINPNSGGTNYA | 537 | CARVPDFWSGYLDYW | 943 |
| 014S-D02 | Fzd5 | GTFSTYAIS | 299 | GIINPSGGSTSYA | 513 | CARAKGSGWYVGSAFDI | 744 |
| | | | | | | W | |
| 014S-E02 | Fzd5 | FTFSDSYMS | 206 | GFIRSKAYGGTTEYA | 490 | CARATQELLLPYGMDV | 758 |
| | | | | | | W | |
| 014S-F02 | Fzd5 | YTFTSYYMH | 392 | GRINPNSGGTNYA | 537 | CARVPDFWSGYLDYW | 943 |
| 014S-G02 | Fzd6 | YTFTSYYMN | 392 | GIISPSGGSTSYA | 516 | CARWGDYGDLYYFDYW | 951 |
| 014S-H02 | Fzd6 | YIFTDYYMH | 368 | GRINPNSGGTNYA | 537 | CARARSSGWTDAFDIW | 751 |
| 014S-A03 | Fzd6 | GTFSSYAIS | 295 | GWINAGNGNTTYA | 558 | CARHYYGSGSYPDW | 880 |
| 014S-B03 | Fzd6 | FTFSSYNMN | 232 | GRIKSKANGGTTDYA | 535 | CARAGDSPDYW | 739 |
| 014S-E03 | Fzd8 | GTFSSYAIS | 295 | GWISPYNGYTKYA | 574 | CARAMWSYGQQNAFDI | 745 |
| | | | | | | W | |
| 014S-G03 | Fzd8 | FTFTSSAVQ | 251 | GWMNPNSGNTGYA | 583 | CARRTAVAGTIDYW | 914 |
| 014S-H03 | Fzd8 | YTFTSSAIH | 387 | GRINPNSGGTNYA | 537 | CARVKWELAIDYW | 940 |
| 014S-B04 | Fzd8 | YIFTDYYMH | 368 | GWMNPNSGNTGYA | 583 | CARGGSRYDFWSGHWY | 837 |
| | | | | | | FDLW | |
| 014S-E04 | Fzd8 | YTFTGYYMH | 379 | GRINPNSGGTNYA | 537 | CARDVPKLVTRGVAYG | 804 |
| | | | | | | MDVW | |
| 014S-F04 | Fzd8 | YSFTTYGMN | 371 | GWINAGNGNTTYA | 558 | CARAAAGSYGGGYW | 736 |
| 014S-G04 | Fzd8 | FTFSSYGMS | 231 | SAISGSGGSTYYA | 600 | CARDLTPFTQQQLVLGLL | 780 |
| 014S-H04 | Fzd8 | FTFTSSAVQ | 251 | GRIVPAIGFTQYA | 540 | CARSGYNRRGYFDYW | 919 |
| 014S-A05 | Fzd8 | GTFSSYAIS | 295 | GGIIPIFGTANYA | 499 | CARVTLGASVDAFDIW | 949 |
| 014S-B05 | Fzd8 | GTFSSYAIS | 295 | GWVSPNTGNTVYA | 587 | CTTDRRYSTYFDLW | 1021 |
| 014S-C05 | Fzd8 | YTFASYGMH | 373 | GWINAGNGNTTYA | 558 | CARLSVWKWEQVTNWF | 890 |
| | | | | | | DPW | |
| 014S-D05 | Fzd8 | GTFTSYAIS | 305 | GWINAGNGNTKYS | 557 | CTTGLFPYYRYNWNNDA | 1022 |
| | | | | | | FDIW | |
| 014S-F05 | Fzd9 | FTFTGSAVQ | 247 | GGILPIYGTTKYA | 509 | CARGARLYGCDYW | 821 |
| 014S-G05 | Fzd9 | FTFSSSWMH | 226 | SAIGTGGGTYYA | 595 | CARKVKGYCSGGSCYGY | 884 |
| | | | | | | W | |
| 014S-H05 | Fzd9 | FTFSNYAMT | 216 | STISGSGVSTFYA | 648 | CARHGRIAADIW | 876 |
| 014S-A06 | Fzd9 | FTFZZSZVQ | 254 | GGILPIYGTTKYA | 509 | CARGARLYGFDYW | 822 |
| 014S-B06 | Fzd9 | FTFSSYSMN | 233 | SYIENDGSITTYA | 654 | CARAPYYYGSGSLFRLDY | 748 |
| | | | | | | W | |
| 014S-C06 | Fzd10 | FTFTGSAVQ | 247 | GGILPIYGTTKYA | 509 | CARGARLYGFDYW | 822 |
| 014S-D06 | Fzd10 | FTFSRYAMH | 219 | SGIGVGGGTYYA | 605 | CARDAYNWFDPR | 763 |
| 014S-F06 | Fzd10 | YIFTDYYMH | 368 | GVIFPVYPTPDYA | 551 | CARGGSTGYYGMDVW | 839 |
| 014S-G06 | Fzd10 | FTFSSYAMH | 227 | SAIGAGGGTYYA | 593 | CARDAYNWFDPW | 764 |
| 014S-H06 | Fzd10 | FTFSSYDMN | 229 | SAIGTGGGTYYA | 595 | CARDAYNWFDPW | 764 |
| 014S-A07 | Fzd10 | FTFSNAQMS | 210 | SAIGTGGGTYYA | 595 | CAREGSYYDWYFDLW | 809 |
| 017S-E08 | Fzd8 | IIFSPNDMG | 313 | ALISSGGSTSYA | 450 | CHFGVASVGLNYW | 980 |
| 017S-H08 | Fzd8 | RTFSSFVMG | 346 | AAVSASGGYTWYA | 432 | CNLAQRGETYW | 998 |
| 017S-A09 | Fzd8 | LAFNGYTMG | 317 | AAISWSDNTYYA | 414 | CAAGFPTVFVVDGEYDY | 680 |
| | | | | | | W | |
| 017S-B09 | Fzd8 | FTLDYYAIS | 255 | ADITSGGSTNYA | 437 | CNAVTYNGYTIW | 994 |
| 017S-C09 | Fzd8 | LTFSDYTVG | 319 | ASSTGGGVFENYA | 464 | CNAVTYNGYTIW | 994 |
| 018S-D06 | Fzd4 | RIFSSYAQA | 330 | PRIPSDSTTFYA | 590 | CEVHNFGATYW | 979 |
| 018S-E06 | Fzd4 | RTFSNYVMG | 344 | AVISRSGGNTYYT | 472 | CNAVSTDWTTDYW | 992 |
| 018S-F06 | Fzd4 | RTFSTYGMG | 349 | AAISWSDNTYYA | 414 | CNSFPLRLHDW | 1002 |
| 018S-G06 | Fzd5 | LAIDDYYMV | 318 | SYISTSDGSTYYA | 673 | CNAVTYNGYSIW | 993 |
| 018S-H06 | Fzd5 | LAFNGYTMG | 317 | AQISWTGGSTDYA | 460 | CNADYGTWYGIGW | 985 |
| 018S-A07 | Fzd5 | LAFNGYTMG | 317 | AAISWMSNTYYA | 412 | CNMGLGYSEYRPLGYW | 999 |
| 018S-B07 | Fzd5 | SAFSNYAMG | 355 | AAITWSGARTYYA | 426 | CNAVWKFGTTHW | 995 |
| 018S-C07 | Fzd7 | LTIDDYYVV | 323 | SYISAGDGFTYYA | 656 | CNAVTYNGYTIW | 994 |
| 017S-F09 | Fzd4 | GSFSGYYWS | 277 | GEINHSGSTNYN | 489 | CARDLRFYSSSWRRVGM | 778 |
| | | | | | | DVW | |
| 017S-G09 | Fzd4 | YTITTYAIH | 396 | GWINADTGDTAYS | 555 | CARGWTTISSLGVW | 872 |
| 017S-H09 | Fzd5 | NIFRIYAIA | 326 | AALTGQRTTNYA | 427 | CNTVTYNAGCYKKYW | 1004 |
| 017S-A10 | Fzd5 | LAFNGYTMG | 317 | ASITWNGRYTYYA | 462 | CNARLDAVYGHSRYDS | 988 |
| | | | | | | W | |
| 017S-B10 | Fzd5 | NFFSNYPLG | 325 | GAISRTGSGTFYA | 484 | CAAGVTGSWRYW | 684 |
| 017S-C10 | Fzd8 | RSFSNYRVA | 335 | AVSWSVGMTYYA | 479 | CNAVTYNGYTIW | 994 |
| 017S- D10 | Fzd8 | GTFGSYAVG | 288 | GLISRNAGNTLYA | 518 | CNAVNGRLNYW | 991 |
| 017S- E10 | Fzd8 | RTFSSYSLA | 348 | AAVSASGANTYYA | 431 | CAAPQSPNMYIRTDQL | 687 |
| | | | | | | WWYKYW | |
| 018S-D07 | Fzd1 | RSFSTYPMG | 336 | TVISGSGGSTYYA | 675 | CAAGPTLPFRYW | 683 |
| 018S-E07 | Fzd1 | RAFSNYAMG | 328 | AAINWSGDSAYYA | 406 | CNARLSFAGGMGYW | 989 |
| 018S-F07 | Fzd1 | IKSMFDMNFMG | 314 | AFITRGGTTRYG | 438 | CNAVSTDWTRDYW | 992 |
| 018S-G07 | Fzd1 | LTIDDYYMV | 322 | SYIGTSDGTTYYA | 655 | CNAVTYNGYTIW | 994 |
| 018S-H07 | Fzd4 | RVFSSYAQA | 354 | AGIASDSTTFYA | 439 | CKVHNFGATYW | 983 |
| 018S-A08 | Fzd4 | RIFSSYAQA | 330 | ASIPSDGTTFYA | 461 | CKVHNFEATYW | 982 |
| 018S-B08 | Fzd4 | LTFSTYGMG | 321 | AAINWSGRSTVYA | 407 | CNSFPLRLHDW | 1002 |
| 018S-C08 | Fzd4 | RTLSSYVVG | 351 | ALISLSGASTYYA | 449 | CNAVSTDWTTDYW | 992 |
| 018S-D08 | Fzd5 | IKSMFDMNFMG | 314 | AFITRGGTTRYG | 438 | CNAVSTDWTRDYW | 992 |
| 018S-E08 | Fzd5 | RTDGMQAMG | 338 | GAITWSLGSAFYA | 486 | CNVLAQNDGDYRTYG | 1007 |
| 018S-F08 | Fzd5 | RTFSSFVMG | 346 | AAVSASGGYTWYA | 432 | CNAVWKFGTTHW | 995 |
| 018S-G08 | Fzd5 | RTFSSFVMG | 346 | AAVSASGGYTWYA | 432 | CNAVCKFGTTHW | 990 |
| 018S-H08 | Fzd5 | RTFSSFVMG | 346 | AAVTASGGYAWYA | 434 | CNAVWKFGTTHW | 995 |
| 018S-A09 | Fzd8 | ITFSFNSVG | 316 | AVFIAGYGAYYA | 470 | CNGVTYNGYTIW | 997 |
| 018S-B09 | Fzd8 | HDFSSTYGVG | 310 | ATISWGGTNIA | 468 | CAAQKPYYNGHFYADDK | 688 |
| | | | | | | HYDHW | |
| 018S-C09 | Fzd8 | ITFGFDSVG | 315 | AVFNAGYRAYYA | 471 | CNAVTYNGYTIW | 994 |
| 018S-D09 | Fzd8 | RTFSWYSMG | 350 | AAVSWSGVSTYYP | 433 | CNAVTYNGYTIW | 994 |
| 018S-E09 | Fzd8 | ITFSFNSVG | 316 | AVFIAGYGAYYA | 470 | CIGVTYNGYTIG | 981 |
| 018S-F09 | Fzd8 | RTDGMQAMG | 338 | GAITWSLGIAFYA | 485 | CNVLAQNDGDYRTYW | 1008 |
| 018S-G09 | Fzd8 | HDFSSTYGVG | 311 | AAISWRGTNIA | 413 | CAAQKPYYNGHFYADDK | 688 |
| | | | | | | HYDHW | |
| 021S-A01 | Fzd8 | DSVSSNSAAWN | 160 | GRAYYKSRWYYDYA | 524 | CVRDLRPSGDLNFDYW | 1029 |
| 021S-C01 | Fzd1 | GSISSGGYSWS | 283 | GSIYHSGSTYYN | 547 | CARFYYDILNGYSYFDYW | 817 |
| 021S-D01 | Fzd1 | FTFSSYGMH | 230 | AVISYDGSNKYYA | 475 | CAKGSVFGLKAGGYADY | 721 |
| | | | | | | W | |
| 021S-E02 | Fzd8 | YTFTSYGIS | 391 | GWISAYNGNTNYA | 570 | CARDGTPFYSGSYYGSW | 772 |
| 021S-G02 | Fzd8 | DSVSSNSGAWN | 162 | GRTYYRSKYYNGYA | 544 | PRLDYW | 1034 |
| 021S-A03 | Fzd8 | DSVSSNSAAWN | 160 | GRTYYRSKWYNDYA | 542 | CARSQATGERFDYW | 921 |
| 022S-H06 | Fzd4 | FTFSSYAMS | 228 | SVISTSGGTVLYT | 652 | CADGSGTSHR | 690 |
| 022S-A11 | Fzd10 | YIFTDYYMH | 368 | GGIFPIFGTANYA | 493 | CAKGSYYYDNSGYYWD | 722 |
| | | | | | | AFDIW | |
| OMP-18RS | | GFTFSHYTLS | 270 | VISGDGSYTYYADSV | 677 | NFIKYVFAN | 1033 |
| | | | | KG | | | |
| 027S-H02 | Fzd5 | FTFSSYAMS | 228 | SAISGSGGSTYYA | 600 | CAKGLWGPLLNW | 718 |
| 027S-B03 | Fzd8 | DSVSSNSATWN | 161 | GRTYYRSKWYSDYA | 543 | CTRGNWNVGLANW | 1014 |
| 027S-E01 | Fzd5 | RSFSIYNTA | 334 | AAISWSGGSTYYA | 418 | CNVITIVRGMGPRAYW | 1006 |
| 004S-D05 | Fzd5 | LTFSIYAMH | 320 | SAISGDGALTYYA | 597 | CARGVYPYSSKHKPSYYY | 870 |
| | | | | | | YGMDVW | |
| 004S-D04 | Fzd5 | YDFTTYGIH | 367 | GGVIPAFGATDYS | 511 | CARGYYYGMDVW | 874 |
| 004S-B05 | Fzd5 | GTFSSYAIS | 295 | GWINAGNGNTTYA | 558 | CASGLGYFDYW | 957 |
| 004S-G03 | Fzd5 | YTFTNNFMH | 383 | GGIIPIFGTPHYA | 502 | CARTLTTPPYYYGMDVW | 929 |
| 004S-F03 | Fzd5 | FTFSNSDMN | 214 | SAIGTGGDTYYA | 594 | CTRDLYGGYRDYW | 1013 |
| 004S-C04 | Fzd5 | YIFTGYYMH | 369 | GRINPNSGGTNYA | 537 | CARGGEYSSGWTYYYYY | 827 |
| | | | | | | GMDVW | |
| 004S-B06 | Fzd5 | YTFTYRYLH | 394 | GMINPIGGSINYA | 522 | CARDVMDVW | 803 |
| 004S-F06 | Fzd5 | FSVGSNYMT | 186 | SSISSGNSYIYYA | 634 | CARGPKTMWEDRPDY | 851 |
| | | | | | | W | |
| 004S-A04 | Fzd5 | FTFSTYSMI | 245 | GFIRSKDYGGTTEYA | 491 | CARLTGGAVAGTHRDY | 892 |
| | | | | | | W | |
| 004S-A05 | Fzd5 | FTFSSYVMS | 237 | SAIGTGGGTYYA | 595 | CARGSSGYYVAW | 862 |
| 004S-F05 | Fzd5 | FTFSNHYMS | 212 | AGVSIDANKKYYA | 447 | CARDQNDSWYRSDYW | 785 |
| 003S-C01 | Fzd1 | GTFSSYAIS | 295 | GRINPNSGGTNYA | 537 | CARGSGYDFFDYGMDV | 861 |
| | | | | | | W | |
| 003S-H01 | Fzd1 | DTFSNYVLS | 164 | GLVDPEDGETIYA | 520 | CAKASTPMVQGAPDYW | 697 |
| 003S-H02 | Fzd1 | GTFNRYAIT | 289 | GGIIPIFGTANYA | 499 | CATTQGVYSSSWYGGG | 976 |
| | | | | | | RAFDIW | |
| 003S-H04 | Fzd1 | YTFTYRYLH | 394 | GRINPNSGGTNYA | 537 | CWGGSYYGDYW | 1030 |
| 003S-A05 | Fzd2 | FTFSSYAMH | 227 | SSISWNSGRVDYA | 638 | CARGSGIAASGSYW | 860 |
| 003S-B05 | Fzd2 | FTFSNAWMS | 211 | STIAGSGGRTYYS | 643 | CAKDSIGRRGRGAPQPY | 709 |
| | | | | | | YYYGMDVW | |
| 003S-F05 | Fzd2 | FSFSTYTMS | 184 | SRINGDGSSTRYA | 624 | CARAIVGATGLNRFKAF | 743 |
| | | | | | | DIW | |
| 003S-G05 | Fzd2 | STFTNAWMS | 363 | SAIGTGGGTYYA | 595 | CARDRVTLRGGYSYGTD | 796 |
| | | | | | | AFDIW | |
| 003S-H05 | Fzd2 | FTLSTYNMN | 257 | SRINYDGSATTYA | 626 | CARDRDIVVVPAQRGEG | 786 |
| | | | | | | GFDPW | |
| 003S-A07 | Fzd2 | FTFSSYAMS | 228 | SAISGSGGSTYYA | 600 | CAKGGRDGYKGYFDYW | 714 |
| 003S-C07 | Fzd2 | FSFRSYSMS | 178 | SAIGTGGGTYYA | 595 | CTTTTVTTSW | 1026 |
| 003S-F07 | Fzd2 | FSFSSYGMS | 183 | SHISSGGATIDYA | 619 | CARDGGYW | 768 |
| 003S-G07 | Fzd2 | FTFSSYWMH | 239 | SYISGDSGYTNYA | 658 | CARDNGYCSGGSCYATY | 783 |
| | | | | | | YGMDVR | |
| 003S-B08 | Fzd2 | FTFSSZZMH | 240 | AVISYDGSNRZYA | 476 | CARSYYDSSGYPRKDAF | 927 |
| | | | | | | DIW | |
| 003S-F08 | Fzd2 | ZSVSSNYMS | 401 | SRINSDGSTISYA | 625 | CARARLLGGYYTPDRM | D750 |
| | | | | | | VW | |
| 003S-H08 | Fzd2 | FTFNRHALS | 197 | ALISSNGDHKYYT | 451 | CARDLMVGRNKLDYW | 777 |
| 003S-A09 | Fzd2 | FTFSSSNMN | 225 | SGISGSGSSTYYA | 611 | CARGRVWSSRDYW | 859 |
| 003S-B09 | Fzd2 | FNIRRZNMZ | 174 | SAIGTGGGTYYA | 595 | CARGDSGSYRDYW | 823 |
| 003S-C09 | Fzd2 | FTFSSSAMH | 224 | SGISGSGTTTYYR | 612 | CARRLIAVAGAEFDPW | 912 |
| 003S-F09 | Fzd4 | FTFSNSDMN | 214 | GRIKSKAYGGTTEYA | 536 | CARQYYFDYW | 909 |
| 003S-H09 | Fzd4 | FTFSSFGMH | 221 | SVISSGGSPYYA | 651 | CATASGDFDYW | 968 |
| 003S-A10 | Fzd4 | FTFDDYAMH | 191 | AIVSYDGTYKYYS | 448 | CARQTRGGTTDGW | 907 |
| 003S-B10 | Fzd4 | FTFSSHSTH | 222 | SAISASGDSTFYA | 596 | CARPIVGATAFDIW | 900 |
| 003S-G10 | Fzd4 | FTZSSYSMN | 264 | SYSSGNSGYTNYA | 674 | CARGVVGSGAFDIW | 868 |
| 003S-B11 | Fzd4 | FTFSDYYMS | 208 | SAIDGAGRTYYT | 591 | CARAIPGDYDYW | 742 |
| 003S-C11 | Fzd4 | FTFTSYAMH | 252 | GGIIPIFGIANYA | 496 | CARTGRGYYGMDVW | 928 |
| 003S-D11 | Fzd4 | FTFSSYSMS | 234 | SYISGDSGYTNYA | 658 | CARAGVATIAFDYW | 741 |
| 003S-F11 | Fzd4 | FTFDDYGMH | 192 | SAISGSGGSTYYA | 600 | CTTPNYYDSR | 1023 |
| 003S-E12 | Fzd4 | GTFSSYAIS | 295 | GWINAGNGNTTYA | 558 | CARHYYGSGSYPDW | 880 |
| 004S-A01 | Fzd4 | FTFSTYGMH | 244 | SYISSSSSAIYYA | 671 | CARGGLDGPIDYR | 830 |
| 004S-G01 | Fzd4 | FTVSSHSMG | 260 | SLVSFDGSKEHYA | 621 | CARLGSTPDYW | 887 |
| 004S-CO2 | Fzd4 | FTFSSYGMH | 230 | AVISYDGSNKYYA | 475 | CASDPVTAATR | 956 |
| 004S-D02 | Fzd4 | FSFSSYGMS | 183 | SGISGSGRSTYYA | 610 | CAKDGYW | 699 |
| 004S-A03 | Fzd4 | FTFSSYAMH | 227 | SGINWNGGSTGYA | 606 | CARPAGSAQNWFDPW | 899 |
| 004S-B03 | Fzd4 | FSFSRYGMS | 180 | SGVGGSGGSTZYA | 617 | CARDGSW | 771 |
| 004S-C03 | Fzd4 | YTFTSYAIS | 388 | GIINPSGGSTSYA | 513 | CARQIGWELMPDIW | 906 |
| 004S-C05 | Fzd5 | ZZZTDYYZQ | 403 | GGMNZNRGNTGYA | 510 | CANGSYAQHLW | 732 |
| 004S-G05 | Fzd5 | FTFSSYWMH | 239 | STISPSGLYIYQA | 649 | CAKDKVPYSYGPNFDYW | 703 |
| 004S-E06 | Fzd5 | FFFSGYWMS | 169 | ANIKQDGSEKYYV | 459 | CARVFPLHDYW | 934 |
| 004S-C06 | Fzd5 | FPFSTFSMN | 176 | AGISWNSGTIDYA | 446 | CARSGPAAMVYYYYGM | 918 |
| | | | | | | DVW | |
| 004S-E07 | Fzd6 | FTLSSHHMN | 256 | SAIGTGGGTYYA | 595 | CAAPDYW | 686 |
| 004S-F07 | Fzd6 | FSFSKKYMT | 179 | SSIDGNGDHVFYA | 629 | CARPYYYDSSGYDPMGD | 904 |
| | | | | | | YW | |
| 004S-C08 | Fzd6 | FTVSSNYMN | 261 | SAIGTGGGTYYA | 595 | CAQGTYW | 735 |
| 004S-F08 | Fzd6 | FTFDDYYMN | 193 | SAVSGNGGGTFYA | 604 | CARGGNYGSGDYW | 833 |
| 004S-G09 | Fzd6 | GTLNNHTLS | 308 | GRIIPIFGTANYA | 526 | CARDRRGYGMDVW | 795 |
| 004S-B10 | Fzd6 | FTFSDYYMS | 208 | SGINWNSAKIGYV | 607 | CARIGAGGAFDIW | 881 |
| 004S-H10 | Fzd6 | FTFSDYYMS | 170 | AVITSGGTFKYYA | 477 | CARNGIAAAEDYW | 896 |
| 004S-B11 | Fzd6 | FTFSSSWMH | 226 | SGISWNSGSIGYA | 615 | CARYSSGGSLDYW | 955 |
| 004S-D11 | Fzd6 | YZFZZZYMH | 400 | GRINPNSGGTNYA | 537 | CARARSSGWTDAFDIW | 751 |
| 004S-F11 | Fzd6 | FTFSSYAMS | 228 | SSISGGGRHTYYA | 632 | CARPYSSSRQGDYW | 903 |
| 004S-G11 | Fzd6 | YIFTDYYMH | 368 | GWINPNSGGTNYA | 564 | CARDRPGFDPW | 790 |
| 004S-B12 | Fzd6 | FTFSSYWIH | 238 | SYISGDSGYTNYA | 658 | CAKGIRWFDPW | 716 |
| 004S-C12 | Fzd6 | YIFTDYYMH | 368 | GWMNPNSGNTGYA | 583 | CASSHYAPGMDVW | 962 |
| 004S-F12 | Fzd7 | FTVGNNYMS | 258 | SSITTTSTLYA | 640 | CARGKEGRYSNYEAAW | 844 |
| 005S-B01 | Fzd7 | FTFRSYGMH | 202 | SLISGSGDNTNYA | 620 | CARREPLYSSRRGAFDIW | 910 |
| 005S-C01 | Fzd7 | FTFSSYSMS | 234 | SAISGSGGSTYYA | 600 | CTRTIVGATPHYW | 1017 |
| 005S-F01 | Fzd7 | FTVSSNYMS | 262 | SAISGSGATTTYA | 598 | CAKGAGYGSGSWQAA | 711 |
| | | | | | | W | |
| 005S-B02 | Fzd8 | YSFTNYAMH | 370 | GRIIPIFGTAZYA | 527 | CARGTFLEWLLTNYGMD | 866 |
| | | | | | | VW | |
| 005S-D02 | Fzd8 | GTFSSYVIS | 297 | GWIGPHNGNTNYA | 554 | CATGWPRYYYGMDVW | 971 |
| 005S-G02 | Fzd8 | YTFTSYYMH | 392 | GGIIPIFGTAZYA | 500 | CARLPYYDFWSGYYGGR | 889 |
| | | | | | | TGFDYW | |
| 005S-H02 | Fzd8 | YTFTYRYLH | 394 | GWINAGNGNTTYA | 558 | CARASLYYDYVWGSYRH | 753 |
| | | | | | | YYFDYW | |
| 005S-B03 | Fzd8 | GTFSSYAIS | 295 | GIINPSGGRTTYA | 512 | CATSFGGGWIVVDTSLW | 975 |
| | | | | | | YW | |
| 005S-CO3 | Fzd8 | GSFSGYAIS | 275 | GGIIPIFGTANYA | 499 | CRVDAFDIW | 1009 |
| 005S-E03 | Fzd8 | FTFTSSAVQ | 251 | GGIIPIFGTANYA | 499 | CARSSGWQNRFAFDIW | 923 |
| 005S-F03 | Fzd8 | YTFTYRYLH | 394 | GWINAGNGNTKYS | 557 | CATDLPVRKGFTYYDILT | 970 |
| | | | | | | GSYGMDVW | |
| 005S-B04 | Fzd8 | YTFTNNFMH | 383 | GGIIPIFGTANHA | 498 | CARGLRYFDWPQGIYYY | 848 |
| | | | | | | YGMDVW | |
| 005S-C04 | Fzd8 | YTFTSYYMH | 392 | GRINPNSGGTNYA | 537 | CARGGLLFDYW | 831 |
| 005S-D04 | Fzd8 | FTFSTYSMS | 246 | STIGTGGGTYYA | 645 | CARVGWLRFLDYW | 938 |
| 005S-G04 | Fzd8 | GTFSSYAIS | 295 | GWMSPSSGNAGYA | 585 | CARNNFLRAFDIW | 897 |
| 005S-A05 | Fzd8 | FAFSSYAMS | 167 | SRIDTDGSTTVYA | 622 | CARAPSYSSGWYVRW | 747 |
| 005S-C05 | Fzd8 | YTFTYYAMH | 395 | GIINPSGGSTSYA | 513 | CARELLPMTTVTSPFIW | 812 |
| 005S-E05 | Fzd8 | GTFSSYAIS | 295 | GGIIPIFGTANYA | 499 | CAIRAFDIW | 694 |
| 005S-C06 | Fzd8 | ZTFSZYDMH | 402 | SSISSSSHYKYYA | 635 | CARVRSKAVAGTLPKRLF | 947 |
| | | | | | | DIW | |
| 005S-E06 | Fzd8 | YTFTSYYMH | 392 | GWMNPNSGNTGYA | 583 | CARGNPTSGHIVVVPAA | 850 |
| | | | | | | TFSDYW | |
| 005S-G06 | Fzd8 | GTFSZZTIS | 302 | GWMNPDSGKTGYA | 579 | CARWAFPIPNAFDIW | 950 |
| 005S-H06 | Fzd8 | YTFTNNFMH | 383 | GGIFPIYGISTYA | 494 | CARDRPSSSWYAFDYW | 791 |
| 005S-A08 | Fzd9 | GTFSZYAIS | 301 | GGIIPIFGTANYA | 499 | CARGGLLRFGDGWGMG | 832 |
| | | | | | | MDVW | |
| 005S-C08 | Fzd9 | YTFTDYHMH | 375 | GWINAGNGNTTYA | 558 | CARASSWYLHYYYGMD | 755 |
| | | | | | | VW | |
| 005S-E08 | Fzd9 | FIFSZYAMS | 171 | SSISAAGAYKYYA | 631 | CARRGYSSGWRDAFDI | 911 |
| | | | | | | W | |
| 005S-F08 | Fzd9 | YTFTSYYMH | 392 | GWINAGNGNTTYA | 558 | CAKDVNYW | 710 |
| 005S-H08 | Fzd9 | GTFSSYAIS | 295 | GRIIPILGTPNYA | 531 | CARDRLAFDYW | 789 |
| 005S-A09 | Fzd9 | FAFSSHWMH | 166 | SAISVSGGTTFYA | 602 | CARWGKRLRGSPYYFDY | 952 |
| | | | | | | W | |
| 005S-F09 | Fzd9 | FTFSIYGMH | 209 | SGISWNSGNIGYA | 614 | CARGPLPTKIGGHYMDV | 852 |
| | | | | | | W | |
| 005S-B10 | Fzd9 | FTFSTXWMS | 241 | AVMYSGGTTYYA | 478 | CARLSYYYDSSGPKGDAF | 891 |
| | | | | | | DIW | |
| 005S-C10 | Fzd9 | FSLSSYGMH | 185 | SSISSSSSYIYYA | 636 | CARSGMVKWLRSFDYW | 917 |
| 005S-E10 | Fzd9 | FTFTSSAMQ | 249 | GVINPGSGGTSYN | 552 | CARGYGDYVWGENYFD | 873 |
| | | | | | | YW | |
| 005S-F10 | Fzd9 | YTLSNYGIS | 397 | GWISAYNGDTKYA | 568 | CARFDYFGGMDVW | 816 |
| 005S-G10 | Fzd9 | YTFTRYAVH | 385 | GGIIPFFNTVNYA | 495 | CAADRSPYYYDSSGYYP | 679 |
| | | | | | | DAFDIW | |
| 005S-A11 | Fzd9 | FTFSSYDMN | 229 | SGISWNSGYIGYA | 615 | CAKGSLLLGYYGMDVW | 720 |
| 005S-B12 | Fzd10 | FTZSSYDMH | 263 | SSISGLGGSTYZA | 633 | CAREAGTTGGWFDPW | 805 |
| 005S-D12 | Fzd10 | FTFSDHYMD | 204 | STIGPAGDTYYP | 644 | CARASTSGDYSLW | 756 |
| 006S-B01 | Fzd10 | YTFTNYCTR | 384 | GLVCPSDGSTSYA | 519 | CARRTSASDIW | 915 |
| 006S-C01 | Fzd10 | FTFTZSAVQ | 253 | GGFDPEDGETIYA | 492 | CTTDPLELPWYW | 1020 |
| 006S-E01 | Fzd10 | YTFTGYYMH | 379 | GIINPSSGRTDYA | 514 | CARDLTYYYDSSGHSPLG | 781 |
| | | | | | | AFDIW | |
| 006S-G01 | Fzd10 | FTFSDFGMN | 203 | AGISGGGGSTDYA | 443 | CARDSDFWYYYGMDV | 797 |
| | | | | | | W | |
| 006S-B02 | Fzd10 | VSFSGYAMH | 366 | AYINSGSSEMNYA | 482 | CAREEWELFGMDVW | 807 |
| 006S-G02 | Fzd10 | YTVTSYAMH | 399 | GGIIPIFGTAKYA | 497 | CAKGGQWLYGMDVW | 713 |
| 014S-A01 | Fzd1 | YTFTSYYMH | 392 | GWVSPSSGNTAYA | 588 | CARDEGAGYYYYYMDV | 766 |
| | | | | | | W | |
| 014S-C01 | Fzd2 | FTFSNYAMT | 216 | SAIGTGGGTYYA | 595 | CATAYRRPGGLDVW | 969 |
| 014S-F01 | Fzd4 | FTFSSYAMH | 227 | SVISTSGDTVLYT | 652 | CARGGSSDVR | 838 |
| 014S-H01 | Fzd4 | FTFSNYGMH | 217 | SYISSSSSTIYYA | 672 | CARAALGYCTGGVCPPV | 737 |
| | | | | | | DYW | |
| 014S-C03 | Fzd7 | YTFTNNFMH | 383 | GIIZPGGGRTIYA | 517 | CAKGDYGALDYW | 712 |
| 014S-D03 | Fzd7 | FNFSSYTMR | 173 | SVIYGGGNTNYA | 653 | CARGGSGGNLSYW | 836 |
| 014S-F03 | Fzd8 | YTFTNNFMH | 383 | GGIIPLFGTANYA | 506 | CARLVVRGGYGMDVW | 893 |
| 014S-A04 | Fzd8 | GTFSSYAIS | 295 | GWISSFNGNTKYA | 575 | CARADDYYDSSGYYYGF | 738 |
| | | | | | | DYW | |
| 014S-C04 | Fzd8 | FTFSSYTMN | 235 | SRINGDGSNTNYA | 623 | CARGWAGFDYW | 871 |
| 014S-D04 | Fzd8 | HTFSGYHIH | 312 | GWINAGNGNTTYA | 558 | CARDLSPMVRGVISGM | 779 |
| | | | | | | DVW | |
| 014S-E05 | Fzd8 | YTFTNNFMH | 383 | GIISPGGGRTIYA | 515 | CAKGDYGALDYW | 712 |
| 014S-E06 | Fzd10 | FTFGNYDMN | 195 | SSLSWNSGTIVYA | 641 | CARDSSSGWYASYYGM | 798 |
| | | | | | | DVW | |
| 027S-C02 | Fzd5 | YTLTTWYMX | 398 | GWMNPNSGNTAYA | 582 | CARGALGMDVW | 819 |
| 027S-E03 | Fzd8 | YTFTGHYMH | 378 | GWMNPNSGNTGYA | 583 | CARGTGGFDYW | 867 |
| 027S-F03 | Fzd8 | YTFTGHYIH | 377 | GWMNPISGNTGYA | 580 | CARSTPFDPW | 925 |
| 027S-G03 | Fzd8 | YTFTHSYIH | 380 | GWINAKSGGTFYA | 559 | CARGDYDFWSGYHEYYY | 824 |
| | | | | | | YGMDVW | |
| 027S-H03 | Fzd8 | YTFTSYYMH | 392 | GWINPNSGGTNYA | 564 | CARAPLDGSGSYYVDW | 746 |
| 027S-A04 | Fzd8 | YTFTNHFMH | 382 | GWISPNRGGTNYA | 571 | CARDCSGGSCYSHFDYW | 765 |
| 027S-B04 | Fzd8 | FTVGSWYMS | 259 | SAIGTGGGTYYA | 595 | CAKDITPYGDYSILSHW | 702 |
| 027S-C04 | Fzd8 | YTFTSHWMH | 386 | GGIIPIFGTTNYA | 503 | CARDSSSWYSYYYYYMD | 799 |
| | | | | | | VW | |
| 027S-D04 | Fzd8 | YTFTTYFMH | 393 | GWIYPNSGGTKYA | 578 | CTTDLRYDSSGPAAFDIW | 1019 |
| 027S-E04 | Fzd8 | FTFSDHYMS | 205 | SGISGSGGTTYYA | 609 | CATYGDFGYFDLW | 978 |
| 027S-C05 | Fzd8 | GSFSTSVFG | 279 | GRIIPLFGTTNYA | 532 | CVKDRAWGFDYW | 1027 |
| 027S-D05 | Fzd8 | YTFTSYYMH | 392 | GWINPKSGGTNYA | 560 | CARGGFVFDYW | 828 |
| 027S-E05 | Fzd8 | GTFSSYAIS | 295 | GMINPSGGSTTYA | 523 | CARQAGLHCSSTSCYLG | 905 |
| | | | | | | NWFDPW | |
| 027S-F05 | Fzd8 | GTFNRYGIS | 290 | GGIIPRLGATDYA | 508 | CAKGNWAFDIW | 719 |
| 027S-G05 | Fzd8 | GTFSSYAIS | 295 | GWISPYNGNTKYA | 572 | CARGVWTTPMGGGGN | 869 |
| | | | | | | WFDPW | |
| 027S-H05 | Fzd8 | GTFGNYGIN | 286 | GWINPNSGGTNYA | 564 | CARETTDYYYGMDVW | 814 |
| 027S-A06 | Fzd8 | GTFSSYAIN | 294 | GVIDPSTGGTNYA | 550 | CARVLPGDSSGWYRGYY | 941 |
| | | | | | | YYYGMDVW | |
| 027S-C06 | Fzd8 | GTFTSYPIS | 306 | GWINTYNGNTIYA | 566 | CARDLDSGFDLW | 776 |
| 027S-D06 | Fzd8 | GTFSSYAIS | 295 | GWISAYNGHTNYA | 569 | CARGGYSYGTVFDYW | 842 |
| 027S-E06 | Fzd8 | YTFTKDYMH | 381 | GGIIPIFGTANYA | 499 | CARGLPPAAGGGGYFQ | 847 |
| | | | | | | HW | |
| 027S-F06 | Fzd8 | FTFSSYAMH | 227 | AVTWYDGSNKYYA | 480 | CAKDLVPYCSGGSCPPSG | 705 |
| | | | | | | W | |
| 027S-G06 | Fzd5 | YTFTDYYMH | 376 | GWMSPNSGNAGFA | 584 | CARGKSGSFDYW | 846 |
| 027S-H06 | Fzd5 | YTFTGHYIH | 377 | GIINPSGGSTSYA | 513 | CARGFCSGGSCLWYGM | 825 |
| | | | | | | DVW | |
| 027S-A07 | Fzd5 | GTFGSYAIT | 287 | GGIIPIFGTANYA | 499 | CAKDNGWYFDLW | 706 |
| 029S-B01 | Fzd1 | GTFSSYAIS | 295 | GRINPHNGNTNYA | 1461 | CARATRVSAAGTVHFQH | 1472 |
| | | | | | | W | |
| 029S-D01 | Fzd2 | YTFTRYYIH | 1452 | GWMNPNSGNTGYA | 583 | CARVRFLEEMDVW | 1494 |
| 029S-C02 | Fzd2 | GTFSSYGIS | 1457 | GIINPSGGSTSYA | 513 | CARGDIVATMGMKKVD | 1478 |
| | | | | | | YYYYMDVW | |
| 029S-F02 | Fzd2 | YTFTRYYLH | 1453 | GWMNPNSGNTGYA | 583 | CARGIGYW | 1481 |
| 029S-H02 | Fzd2 | GTFSTYAIS | 298 | GDIIPIFGSANYA | 1458 | CARELGLGWFDPW | 1476 |
| 030S-A02 | Fzd7 | YTFTDYYMH | 1449 | GWMNPNSGSTGYA | 1467 | CARGDINYGNFDYW | 1477 |
| 030S-B02 | Fzd3 | YTFTDYYMH | 1449 | GWMNPNSGNTGYA | 583 | CARQGGSYSMGLDPW | 1488 |
| 029S-E03 | Fzd3 | YTFTGYYMH | 379 | GWINPNSGNTGYA | 1463 | CARSYYGVIDAFDIW | 1492 |
| 029S-G03 | Fzd3 | YTFTNYYMH | 1451 | GWMNPNSGNTGYA | 583 | CAREDDFWSGGGMDV | 1474 |
| | | | | | | W | |
| 030S-E03 | Fzd3 | FTFSDYYMS | 1438 | SAISGSGHSTYYA | 1468 | CAREGLRGWSIFDIW | 1475 |
| 029S-D05 | Fzd3 | YTFTDHYFH | 1447 | GWANPSSGNTGTA | 1462 | CARSRLRWDWYFDLW | 1491 |
| 030S-H03 | Fzd3 | FSFSSHAMS | 1437 | SAIGTGGGTYYA | 595 | CANPKHYW | 1470 |
| 029S-B06 | Fzd3 | YTFSRHYIH | 1446 | GWMNPNSGNTGYA | 583 | CARGGHTGYSSGWYNH | 1479 |
| | | | | | | W | |
| 029S-E06 | Fzd3 | YWFTASYMH | 1455 | GWMKPDSGNTGYA | 1465 | CARRSSSWGWYFDLW | 1489 |
| 029S-H06 | Fzd3 | YTFAKYYIH | 1444 | GWMNPNSGNTGYA | 583 | CARHKRHTPYAFDIW | 1487 |
| 029S-G07 | Fzd3 | YTFTDSYIH | 1448 | GWISAYNGNTNYA | 570 | CARGSGYFDLW | 1486 |
| 029S-H08 | Fzd3 | YTFTGHYMH | 378 | GWMNPNSGNTGYA | 583 | CARVGDYDRFNWYFDL | 1493 |
| | | | | | | W | |
| 029S-F09 | Fzd3 | GTFSSYAIT | 1456 | GWISAYNGNTNYA | 570 | CARANRGLRKNYYYGM | 1471 |
| | | | | | | DVW | |
| 030S-F04 | Fzd3 | YTFTSSYIH | 1454 | GIINPSGGGAVYA | 1459 | CARWTTVVTGAAFDIW | 1495 |
| 029S-A10 | Fzd3 | YSFTGYYLH | 1442 | GWINPNSGGTNYA | 564 | CARDHGTMIAVAGTFDY | 1473 |
| | | | | | | YYYMDVW | |
| 029S-B11 | Fzd3 | YTFNGYYMH | 1445 | GIVNPSGGGTNYA | 1460 | CARGGNYGRWLQPWYF | 1480 |
| | | | | | | DLW | |
| 029S-D11 | Fzd3 | HTFTSHYMH | 1440 | GWMNPNSANAGY | 1466 | CARGLGYFDLW | 1483 |
| | | | | A | | | |
| 030S-H05 | Fzd7 | YSFTNYYMH | 1443 | GWMNPNSGNTGYA | 583 | CARSPDFWSGEGYFDLW | 1490 |
| 030S-A06 | Fzd7 | YMFTGHDMH | 1441 | GRIIPILGIANYA | 529 | CARGIHGDYGLDYYYMD | 1482 |
| | | | | | | VW | |
| 029S-C12 | Fzd7 | YTFTGYYMH | 379 | GWMNPNSGNTGYA | 583 | CARGMEYW | 1484 |
| 030S-C06 | Fzd7 | YTFTGYYIH | 1450 | GWMDPNSGYTGYA | 1464 | CARGPADFWSGYKNDY | 1485 |
| | | | | | | FDFW | |
| 4A12 | Fzd5 | GYTFTNYDIN | 1439 | WIYPRDGSTKYNEKF | 1469 | CVRSAWGFAY | 1496 |
| | | | | KG | | | |
| 1791 | Fzd7 | TYAMH | 2190 | RIRSKSNNYAKNY | 2193 | ENYGGRFDY | 2196 |
| | | | | DDSVKD | | | |
| 1291 | Fzd7 | SYAMS | 2191 | TISDGGSYTRYPDK | 2194 | VGGRRDYFDY | 2197 |
| | | | | LKG | | | |
| 18R5 | Fzd7 | GFTFSHYTLS | 2192 | VISGDGSYTYYADS | 2195 | NFIKYVFAN | 2198 |
| | | | | VKG | | | |
| 001S-A01 | Fzd1 | SGSSSNIGSHTVS | 1156 | SNYQRPS | 1256 | CAAWDGSLFGHWVF | 1265 |
| 001S-B01 | Fzd1 | RSSRSLLDTDDGN | 1142 | TLSHRAS | 1259 | CMQSIQLPWTF | 1295 |
| | | TYLD | | | | | |
| 001S-E01 | Fzd1 | SGNTLGSHYVS | 1155 | QDSKRPS | 1246 | CQVWDSSTVVF | 1431 |
| 001S-F01 | Fzd1 | RSSQSLLHSNGYN | 1138 | LGSNRAS | 1237 | CMQGTHWPYTF | 1289 |
| | | YLD | | | | | |
| 001S-G01 | Fzd1 | TRSSSNIGAGYDV | 1161 | GNSIRPS | 1220 | CGTWDSSLSAWVF | 1267 |
| | | H | | | | | |
| 001S-H01 | Fzd1 | RSSQSLLHSNGYN | 1138 | LGSKRAS | 1236 | CMQALQIPPTF | 1280 |
| | | YLD | | | | | |
| 001S-A02 | Fzd1 | QASQDIGKYLN | 1041 | DASNLET | 1185 | CQQNDYLPLTF | 1332 |
| 001S-E02 | Fzd1 | RSSQSLLHSNGYN | 1138 | LGSNRAS | 1237 | CMQGTHWPYTF | 1289 |
| | | YLD | | | | | |
| 001S-G02 | Fzd1 | RASQSVGTYLT | 1110 | DASNRAT | 1188 | CMQATQFPLTF | 1284 |
| 001S-H02 | Fzd1 | TRSSSNIGAGYDV | 1161 | GNSIRPS | 1220 | CGTWDSSLSAWVF | 1267 |
| | | H | | | | | |
| 001S-A03 | Fzd1 | RASRSISSYFN | 1128 | AASSLQS | 1175 | CQQADTFPPTF | 1314 |
| 001S-B03 | Fzd1 | SGDKVGHKYAS | 1154 | EDSQRPS | 1199 | CQAWDSSTDVVF | 1301 |
| 001S-H08 | Fzd5 | | | | | | |
| 001S-A09 | Fzd5 | | | | | | |
| 001S-B09 | Fzd5 | | | | | | |
| 001S-C09 | Fzd5 | | | | | | |
| 001S-C07 | Fzd8 | QGDSLRTYYAS | 1052 | GKNNRPS | 1219 | CNSRDNSGKHKVF | 1300 |
| 001S-D07 | Fzd8 | RSSQSLLHSNGFN | 1136 | FGSYRAS | 1206 | CMQNLQTPWTF | 1291 |
| | | YVD | | | | | |
| 001S-E07 | Fzd8 | RASQGIRSDLA | 1070 | AASTLES | 1177 | CLQDYSYPRTF | 1273 |
| 001S-H07 | Fzd8 | RASQSVSSYLA | 1121 | GASSRAT | 1213 | CQQYGSSPPTF | 1410 |
| 004S-E05 | Fzd5 | RASQGISSALA | 1076 | AASALQS | 1165 | CQQTYSTPRTF | 1394 |
| 004S-E03 | Fzd5 | RASQSISSYLN | 1098 | AASSLQS | 1175 | CQQSYSTPLTF | 1372 |
| 004S-G06 | Fzd5 | RASQSISSYLN | 1098 | AASSLQS | 1175 | CQQSYSTPLTF | 1372 |
| 001S-D09 | Fzd8 | | | | | | |
| 001S-E09 | Fzd8 | | | | | | |
| 001S-F09 | Fzd8 | | | | | | |
| 001S-G09 | Fzd8 | | | | | | |
| 001S-H09 | Fzd8 | | | | | | |
| 001S-A10 | Fzd8 | | | | | | |
| 001S-B10 | Fzd8 | | | | | | |
| 001S-G12 | Fzd1 | | | | | | |
| 002S-A01 | Fzd1 | | | | | | |
| 002S-B01 | Fzd1 | | | | | | |
| 002S-C01 | Fzd1 | | | | | | |
| 002S-D01 | Fzd1 | | | | | | |
| 002S-E01 | Fzd1 | | | | | | |
| 002S-F01 | Fzd1 | | | | | | |
| 002S-G01 | Fzd1 | | | | | | |
| 002S-H01 | Fzd1 | | | | | | |
| 002S-A02 | Fzd1 | | | | | | |
| 002S-B02 | Fzd1 | | | | | | |
| 002S-C02 | Fzd1 | | | | | | |
| 002S-D02 | Fzd1 | | | | | | |
| 002S-E02 | Fzd1 | | | | | | |
| 002S-F02 | Fzd1 | | | | | | |
| 002S-G02 | Fzd1 | | | | | | |
| 002S-H02 | Fzd1 | | | | | | |
| 002S-D03 | Fzd1 | | | | | | |
| 002S-E03 | Fzd1 | | | | | | |
| 002S-F03 | Fzd1 | | | | | | |
| 002S-G03 | Fzd1 | | | | | | |
| 002S-H03 | Fzd1 | | | | | | |
| 002S-A04 | Fzd1 | | | | | | |
| 002S-B04 | Fzd1 | | | | | | |
| 002S-C04 | Fzd1 | | | | | | |
| 002S-D04 | Fzd1 | | | | | | |
| 002S-E04 | Fzd1 | | | | | | |
| 004S-H04 | Fzd5 | RASQSISSYLN | 1098 | AASSLQS | 1175 | CQQSYSTPLTF | 1372 |
| 001S-A04 | Fzd5 | GLSSGSVSTNYYP | 1035 | YTNTRSS | 1263 | CLLYLGRGIWVF | 1271 |
| | | S | | | | | |
| 001S-D03 | Fzd5 | TGTSSDVGGYNSV | 1159 | DVTKRPS | 1196 | CFSYAGSRF | 1266 |
| | | S | | | | | |
| 001S-F03 | Fzd5 | TRSSGSIASNYVQ | 1160 | ENDKRPS | 1202 | CQSYDYDHRWVF | 1430 |
| 004S-E04 | Fzd5 | RASQSISSYLN | 1098 | AASSLQS | 1175 | CQQSYSTPLTF | 1372 |
| 004S-A06 | Fzd5 | RASQSISSYLN | 1098 | AASSLQS | 1175 | CQQSYSTPLTF | 1372 |
| 004S-F04 | Fzd5 | RASQGISSALA | 1076 | AASTLQS | 1179 | CQQSYNTPWTF | 1351 |
| 001S-C03 | Fzd5 | RSSQSLLRRNGHN | 1139 | MGSNRAP | 1238 | CMHGLHPPFTF | 1279 |
| | | YVD | | | | | |
| 003S-A01 | Fzd1 | RASQGISNNLN | 1072 | GASTLQS | 1215 | CQQADSFPPTF | 1312 |
| 003S-E01 | Fzd1 | RASQSISSYLN | 1098 | AASSLQS | 1175 | CQQSYSTPLTF | 1372 |
| 003S-F01 | Fzd1 | RASQSISSYLN | 1098 | AASSLQS | 1175 | CQQSYSTPLTF | 1372 |
| 003S-A02 | Fzd1 | RASQGISNYLA | 1074 | EVSSVQG | 1204 | CQQSYSTPLAF | 1370 |
| 003S-C02 | Fzd1 | RASQSIGRWLA | 1084 | AASRLQS | 1171 | CQQGFNFPLTF | 1325 |
| 003S-E02 | Fzd1 | RASQGISNNLN | 1072 | TASSLQS | 1258 | CLQDYSYPYTF | 1274 |
| 003S-F02 | Fzd1 | RASQSVSSDLA | 1115 | GASTRAT | 1217 | CQQYETWPVLTF | 1405 |
| 003S-G02 | Fzd1 | RASESVSSSSFA | 1056 | GASTRAT | 1217 | CQQYNNWPPNYTF | 1420 |
| 003S-C03 | Fzd1 | QANQDISNYLN | 1038 | AASSLQS | 1175 | CQQTYNPPRTF | 1389 |
| 003S-D03 | Fzd1 | RASQGISNNLN | 1072 | AASSLQR | 1174 | CQQSYSTPFTF | 1368 |
| 003S-E03 | Fzd1 | RASQGISNNLN | 1072 | SASNLQS | 1252 | CQQSYSPPPYTF | 1364 |
| 003S-H03 | Fzd1 | RASQSISSYLN | 1098 | AASSLQS | 1175 | CQQSYSTPLTF | 1372 |
| 003S-A04 | Fzd1 | RTSERSSISSFA | 1148 | GASTRAT | 1217 | CQQYNNWPRNYTF | 1420 |
| 003S-C04 | Fzd1 | RASQGISNNLN | 1072 | KASSLEN | 1225 | CQQSYSTPHTF | 1369 |
| 003S-D04 | Fzd1 | QASQDIGNYLN | 1042 | DVSNLER | 1195 | CQHLNSYPPGDTF | 1304 |
| 003S-G04 | Fzd1 | RASQSISSYLN | 1098 | AASSLQS | 1175 | CQQSYSTPLTF | 1372 |
| 003S-D05 | Fzd2 | RSSQSLLHSDGKT | 1134 | LGSNRAS | 1237 | CMQNTHWPLTR | 1293 |
| | | YLY | | | | | |
| 003S-E05 | Fzd2 | KSSQSLLHSDGKT | 1036 | LGSNRAS | 1237 | CMQNTHWPLTR | 1293 |
| | | YLY | | | | | |
| 003S-A06 | Fzd2 | RASQGISNNLN | 1072 | AASRLES | 1170 | CQQSYSTPLTF | 1372 |
| 003S-C06 | Fzd2 | RASQDISSYLA | 1065 | AASSLQS | 1175 | CQQSYRTPLTF | 1353 |
| 003S-G06 | Fzd2 | RASQSVSSNLA | 1116 | DASNRAT | 1188 | CQHRTSWPLTF | 1307 |
| 003S-H06 | Fzd2 | RASQRVGNNLA | 1083 | DASIRAT | 1184 | CQQYKDWPTF | 1415 |
| 003S-B07 | Fzd2 | RASQSVGSYLA | 1109 | GSSNRAA | 1221 | CQQYGTSLLTF | 1414 |
| 003S-D07 | Fzd2 | QASQGISNNLN | 1049 | LGSDRAS | 1233 | CQQSYSTPFTF | 1368 |
| 003S-E07 | Fzd2 | RASQSISSYLN | 1098 | AASSLQS | 1175 | CQQSYSTPFTF | 1368 |
| 003S-A08 | Fzd2 | RSSQSLLHSDGKT | 1134 | LGFNRAS | 1232 | CMQNTHWPLTR | 1293 |
| | | YLY | | | | | |
| 003S-C08 | Fzd2 | RASQGIRNDLG | 1069 | GASTLQR | 1214 | CQQSYSTPRVTF | 1374 |
| 003S-E08 | Fzd2 | RSSRSLLHSDGKTY | 1143 | LGSNRAS | 1237 | CMQSSHWPKTF | 1298 |
| | | LY | | | | | |
| 003S-G09 | Fzd4 | RASQSISSYLN | 1098 | AASSLQS | 1175 | CQQSYSTPLTF | 1372 |
| 003S-C10 | Fzd4 | RASQSISSYLN | 1098 | AASSLQS | 1175 | CQQSYSTPLTF | 1372 |
| 003S-D10 | Fzd4 | RASQGISSYLA | 1076 | AASNLLG | 1167 | CQQTYSTPWTF | 1396 |
| 003S-E10 | Fzd4 | RASQSIGSNLD | 1085 | AASTLET | 1178 | CQQSYSVPDTF | 1380 |
| 003S-A11 | Fzd4 | RASQSISZYZN | 1103 | ZASSLQS | 1264 | CQQSYSTPLTF | 1372 |
| 003S-G11 | Fzd4 | RASQSISSYLN | 1098 | AASSLQS | 1175 | CQQSYSTPLTF | 1372 |
| 003S-H11 | Fzd4 | RASQSIGSNLD | 1085 | DASSLES | 1189 | CQQSFIMPLTF | 1341 |
| 003S-C12 | Fzd4 | RASQSISSYLN | 1098 | AASSLQS | 1175 | CQQSYSTPLTF | 1372 |
| 003S-F12 | Fzd4 | RASQSISSYLN | 1098 | AASSLQS | 1175 | CQQSYSTPLTF | 1372 |
| 004S-B01 | Fzd4 | RAIQSISSYLN | 1054 | AASSLQS | 1175 | CQQSYSTPLTF | 1372 |
| 004S-C01 | Fzd4 | RASQDIRDELA | 1062 | AASTLQS | 1179 | CQQADSFPLTF | 1311 |
| 004S-D01 | Fzd4 | RASQSISSYLN | 1098 | AASSLQS | 1175 | CQQSYSTPLTF | 1372 |
| 004S-E01 | Fzd4 | ZACLRIISYLN | 1163 | FASSLQS | 1205 | CQQSYSTPLTF | 1372 |
| 004S-F01 | Fzd4 | RASQGISNWLA | 1073 | DASSLQS | 1190 | CQQSHITPYTF | 1344 |
| 004S-H01 | Fzd4 | RASQSISSYLN | 1098 | AASSLQS | 1175 | CQQSYSTPLTF | 1372 |
| 004S-B02 | Fzd4 | RASQSISSYLN | 1098 | AASSLQS | 1175 | CQQSYSTPLTF | 1372 |
| 004S-E02 | Fzd4 | RASQSISSYLN | 1098 | AASSLQS | 1175 | CQQSYSTPLTF | 1372 |
| 004S-F02 | Fzd4 | RASQGISSALA | 1076 | AASTLQS | 1179 | CQQANTVPFTF | 1322 |
| 004S-G02 | Fzd4 | RASQSISSYLN | 1098 | AASSLQS | 1175 | CQQSYSTPLTF | 1372 |
| 004S-H02 | Fzd4 | RASQSISSYLN | 1098 | AASSLQS | 1175 | CQQSYSTPLTF | 1372 |
| 001S-E03 | Fzd5 | TGSSSNIGAGFGV | 1158 | SDRNRPS | 1255 | CQSYDSSLRASVF | 1429 |
| | | H | | | | | |
| 001S-B05 | Fzd5 | RSSQSLLHSNGNT | 1137 | LGSDRTS | 1234 | CMQSLQTPYTF | 1297 |
| | | YLD | | | | | |
| 004S-A07 | Fzd6 | RASQDIRSALA | 1063 | QASSLIS | 1245 | CQQSYSMPQTF | 1361 |
| 004S-B07 | Fzd6 | QASQDIRNYLN | 1043 | AASSLQS | 1175 | CQQSSRFWTF | 1347 |
| 004S-A08 | Fzd6 | RASQSISSYLN | 1098 | AASSLQS | 1175 | CQQSYSTPLTF | 1372 |
| 004S-B08 | Fzd6 | RASQSISSYLN | 1098 | AASSLQS | 1175 | CQQSYSTPLTF | 1372 |
| 004S-D08 | Fzd6 | RASQSISSYLN | 1098 | AASSLQS | 1175 | CQQSYSTPLTF | 1372 |
| 004S-E08 | Fzd6 | RSSRSLLHSNGNT | 1144 | LGSNRAS | 1237 | CVQTTQSPLTF | 1434 |
| | | YLQ | | | | | |
| 004S-G08 | Fzd6 | RASQSISSYLN | 1098 | AASSLQS | 1175 | CQQSYSTPLTF | 1372 |
| 004S-A09 | Fzd6 | RASQSISSYLN | 1098 | AASSLQS | 1175 | CQQSYSTPLTF | 1372 |
| 004S-B09 | Fzd6 | RASQGISSALA | 1076 | AASSLQS | 1175 | CQQSYSHTAFTF | 1357 |
| 004S-C09 | Fzd6 | RASQSISSYLN | 1098 | AASSLQS | 1175 | CQQSYSTPLTF | 1372 |
| 004S-E09 | Fzd6 | RASQSISSYLN | 1098 | AASSLQS | 1175 | CQQSYSTPLTF | 1372 |
| 004S-F09 | Fzd6 | RASQSISSYLN | 1098 | AASSLQS | 1175 | CQQSYSTPLTF | 1372 |
| 004S-H09 | Fzd6 | RASQSISSYLN | 1098 | AASSLQS | 1175 | CQQSYSTPLTF | 1372 |
| 004S-C10 | Fzd6 | RASQSISSYLN | 1098 | AASSLQS | 1175 | CQQSYSTPLTF | 1372 |
| 004S-D10 | Fzd6 | RASQNINNYLA | 1081 | RASTLQS | 1249 | CQQYSSYPYTI | 1425 |
| 004S-E10 | Fzd6 | RASQSISSYLN | 1098 | AASSLQS | 1175 | CQQSYSTPLTF | 1372 |
| 004S-F10 | Fzd6 | RASQSISSYLN | 1098 | AASSLQS | 1175 | CQQSYSTPLTF | 1372 |
| 004S-G10 | Fzd6 | RASQSISSYLN | 1098 | AASSLQS | 1175 | CQQSYSTPLTF | 1372 |
| 004S-A11 | Fzd6 | RASQSISSYLN | 1098 | AASSLQS | 1175 | CQQSYSTPLTF | 1372 |
| 004S-C11 | Fzd6 | RASQSISSYLN | 1098 | AASSLQS | 1175 | CQQSYSTPLTF | 1372 |
| 004S-Ebb | Fzd6 | RASQSISSYLN | 1098 | AASSLQS | 1175 | CQQSYSTPLTF | 1372 |
| 004S-H11 | Fzd6 | RASQSISRWLA | 1094 | AASSLQS | 1175 | CQQYVSYPLTF | 1426 |
| 004S-A12 | Fzd6 | RASQSISSYLN | 1098 | AASSLQS | 1175 | CQQSYSTPLTF | 1372 |
| 004S-D12 | Fzd6 | RASQSISSYLN | 1098 | AASSLQS | 1175 | CQQSYSTPLTF | 1372 |
| 005S-H01 | Fzd7 | RASQSISSYLN | 1098 | AASSLQS | 1175 | CQQSYSTPLTF | 1372 |
| 005S-A02 | Fzd7 | RASQSISSYLN | 1098 | AASSLQS | 1175 | CQQSYSTPLTF | 1372 |
| 005S-0O2 | Fzd8 | RASQSISSYLN | 1098 | AASSLQS | 1175 | CQQSYSTPLTF | 1372 |
| 005S-E02 | Fzd8 | RASQSISSYLN | 1098 | AASSLQS | 1175 | CQQSYSTPLTF | 1372 |
| 005S-A03 | Fzd8 | RASQSISSYLN | 1098 | AASSLQS | 1175 | CQQSYSTPLTF | 1372 |
| 005S-H03 | Fzd8 | RASQGISNNLN | 1072 | DASTLQT | 1193 | CQQSFSAPITF | 1342 |
| 005S-F04 | Fzd8 | RASQSISSYLN | 1098 | AASSLQS | 1175 | CQQSYSTPLTF | 1372 |
| 005S-H04 | Fzd8 | RASQSISSYLN | 1098 | AASSLQS | 1175 | CQQSYSTPLTF | 1372 |
| 005S-B05 | Fzd8 | QASQDISNYLN | 1046 | KASSLES | 1226 | CQQSYSTPRTF | 1373 |
| 005S-F05 | Fzd8 | RASQSISSYLN | 1098 | AASSLQS | 1175 | CQQSYSTPLTF | 1372 |
| 005S-G05 | Fzd8 | RASQSISSYLN | 1098 | AASSLQS | 1175 | CQQSYSTPLTF | 1372 |
| 005S-H05 | Fzd8 | RASQGISRTLZ | 1075 | AASSLQS | 1175 | CQQTYSMPITF | 1392 |
| 005S-D06 | Fzd8 | RASQSISSYLN | 1098 | AASSLQS | 1175 | CQQSYSTPLTF | 1372 |
| 005S-F06 | Fzd8 | RASQSVGSNLA | 1108 | GASSRAT | 1213 | CQQYGSSPPFTF | 1409 |
| 005S-A07 | Fzd9 | RASQSVSRNLA | 1114 | GASTRAT | 1217 | CQQRSNWPITF | 1335 |
| 005S-B07 | Fzd9 | RASQGISSALA | 1076 | GASTLQS | 1215 | CLQDYNYPFTF | 1272 |
| 005S-C07 | Fzd9 | RASQSISSYLN | 1098 | AASSLQS | 1175 | CQQSYSTPLTF | 1372 |
| 005S-D07 | Fzd9 | RASQSINRWLA | 1090 | AASSLQS | 1175 | CQQTYNIPITF | 1388 |
| 005S-F07 | Fzd9 | RASQSINRNYLG | 1089 | AASSRVT | 1176 | CQQYDSWPPTF | 1402 |
| 005S-G07 | Fzd9 | RASQGISNNLN | 1072 | AASSLQS | 1175 | CQHYYNLPLTF | 1309 |
| 005S-H07 | Fzd9 | RASQTINNQLA | 1125 | KASNLET | 1224 | CQQANSFPVTF | 1318 |
| 005S-B08 | Fzd9 | RASQSISSYLN | 1098 | AASSLQS | 1175 | CQQSYSTPLTF | 1372 |
| 005S-D08 | Fzd9 | RASQSISSYLN | 1098 | AASSLQS | 1175 | CQQSYSTPLTF | 1372 |
| 005S-G08 | Fzd9 | QTSQDINNNLN | 1053 | KASSLES | 1226 | CQQSYSSPPTF | 1366 |
| 005S-C09 | Fzd9 | QASQDISNYLN | 1046 | AASTLQS | 1179 | CLQHKSFPTF | 1276 |
| 005S-D09 | Fzd9 | RASQSVSSNQLA | 1117 | GASTRAT | 1217 | CQQRYNWPPSITF | 1339 |
| 005S-E09 | Fzd9 | RASQSVSSNLA | 1116 | DASNRAT | 1188 | CQQRNNWLYTF | 1334 |
| 005S-A10 | Fzd9 | RASQSISSYLN | 1098 | AASSLQS | 1175 | CQQSYSTPLTF | 1372 |
| 005S-D10 | Fzd9 | RASQGISNNLN | 1072 | AASTLQS | 1179 | CQQTNLFPYTF | 1385 |
| 005S-H10 | Fzd9 | RASQSVSSNLA | 1116 | GASTRAT | 1217 | CQQYNSWPLTF | 1421 |
| 005S-611 | Fzd9 | RASQSISRWLA | 1094 | AASSLQS | 1175 | CQQTNTFPFTF | 1386 |
| 005S-C11 | Fzd9 | RASQSVSRKLA | 1113 | GASTRAT | 1217 | CQQRSNWPITF | 1335 |
| 005S-D11 | Fzd9 | RASQSLRSKLA | 1106 | GASTRAT | 1217 | CQQYANSPWTF | 1401 |
| 005S-E11 | Fzd9 | QASQDISNYLN | 1046 | GASTLQS | 1215 | CQQLSRYPSLF | 1331 |
| 005S-G11 | Fzd9 | RASQSVSSNLA | 1116 | GASNRPT | 1209 | CQQYGSSPYTF | 1413 |
| 005S-H11 | Fzd10 | RASQSISSYLN | 1098 | AASSLQS | 1175 | CQQSYSTPLTF | 1372 |
| 005S-E12 | Fzd10 | RASQSVGRWMA | 1107 | AASSLQS | 1175 | CQQANTFPFTF | 1321 |
| 005S-F12 | Fzd10 | RASQSISSYLN | 1098 | AASSLQS | 1175 | CQQSYSTPLTF | 1372 |
| 006S-A01 | Fzd10 | RASQSISSYLN | 1098 | AASSLQS | 1175 | CQQSYSTPLTF | 1372 |
| 006S-F01 | Fzd10 | RASQSISSYLN | 1098 | AASSLQS | 1175 | CQQSYSTPLTF | 1372 |
| 006S-H01 | Fzd10 | RASQGISNNLN | 1072 | AASNLET | 1166 | CQQTSSTPLTF | 1387 |
| 006S-A02 | Fzd10 | RASQSISSYLN | 1098 | AASSLQS | 1175 | CQQSYSTPLTF | 1372 |
| 006S-D02 | Fzd10 | RASQGISNNLN | 1072 | DASSLES | 1189 | CQQTYNTPRTF | 1390 |
| 006S-E02 | Fzd10 | RASQGISNNLN | 1072 | AASSLQS | 1175 | CLQHNGYPITF | 1277 |
| 006S-H02 | Fzd10 | RSSQSLLHSNGYN | 1138 | RVSSRFS | 1251 | CMQGTHWPPTF | 1288 |
| | | YLD | | | | | |
| 006S-A03 | Fzd10 | RASESVSSNLA | 1055 | GASSRAT | 1213 | CQQYNKSPSF | 1419 |
| 006S-B03 | Fzd10 | RASQTISRYLN | 1126 | EVSSLQG | 1203 | CQQSYSTPWTF | 1378 |
| 006S-CO3 | Fzd10 | RASQSISSYLN | 1098 | AASSLQS | 1175 | CQQSYSTPLTF | 1372 |
| 014S-B01 | Fzd1 | RASQGISNNLN | 1072 | GASTLQS | 1215 | CQQADSFPPTF | 1312 |
| 014S-D01 | Fzd4 | RASQSISSHZN | 1096 | AASSLQS | 1175 | CQQSYSTPLTF | 1372 |
| 014S-E01 | Fzd4 | RASQSIZZYZN | 1105 | AASSLQS | 1175 | CQQSYSTPLTF | 1372 |
| 014S-G01 | Fzd4 | RASQSISSYLN | 1098 | AASSLQS | 1175 | CQQSYSTPFTF | 1368 |
| 014S-A02 | Fzd4 | RASQGISSALA | 1076 | GASTVES | 1218 | CQQSYSTPRTF | 1373 |
| 014S-B02 | Fzd4 | RASQSVSSNLA | 1116 | GASTRAT | 1217 | CQQYDTPLRTF | 1403 |
| 014S-CO2 | Fzd5 | RASQGISSALA | 1076 | AASSLQS | 1175 | CQQTYSMPITF | 1392 |
| 014S-D02 | Fzd5 | RASQSISSYLN | 1098 | AASSLQS | 1175 | CQQSYSTPLTF | 1372 |
| 014S-E02 | Fzd5 | RASQSISSYLN | 1098 | AASSLQS | 1175 | CQQSYSTPLTF | 1372 |
| 014S-F02 | Fzd5 | RASQGVSTZLS | 1079 | AASSLQS | 1175 | CQQTYSMPITF | 1392 |
| 014S-G02 | Fzd6 | RASQGISSALA | 1076 | ATSTLQS | 1183 | CQQVNSYPPTF | 1399 |
| 014S-H02 | Fzd6 | RASQSVSSWLA | 1120 | AASTLQT | 1180 | CQQSYSTPTF | 1376 |
| 014S-A03 | Fzd6 | RASQSISSYLN | 1098 | AASSLQS | 1175 | CQQSYSTPLTF | 1372 |
| 014S-B03 | Fzd6 | RASQSISSYLN | 1098 | AASSLQS | 1175 | CQQSYSTPLTF | 1372 |
| 014S-E03 | Fzd8 | RASQSISSYLN | 1098 | AASSLQS | 1175 | CQQSYSTPLTF | 1372 |
| 014S-G03 | Fzd8 | RASQSISSYLN | 1098 | AASSLQS | 1175 | CQQSYSTPLTF | 1372 |
| 014S-H03 | Fzd8 | RASQSISSYLN | 1098 | AASSLQS | 1175 | CQQSYSTPLTF | 1372 |
| 014S-B04 | Fzd8 | RASQGISNYLA | 1074 | AASSLQS | 1175 | CQQSYSTPFTF | 1368 |
| 014S-E04 | Fzd8 | RASQSISSYLN | 1098 | AASSLQS | 1175 | CQQSYSTPLTF | 1372 |
| 014S-F04 | Fzd8 | RASQGISNNLN | 1072 | EASSVAS | 1197 | CQQSYTSTPLNSF | 1381 |
| 014S-G04 | Fzd8 | RASQSVSGYLA | 1112 | GASTRAA | 1216 | CQQYNYWPPAF | 1423 |
| 014S-H04 | Fzd8 | RASQSISSYLN | 1098 | AASSLQS | 1175 | CQQSYSTPLTF | 1372 |
| 014S-A05 | Fzd8 | RASQGISNNLN | 1072 | DASSLES | 1189 | CLQHNSLPFTF | 1278 |
| 014S-B05 | Fzd8 | RASQSVSSNLA | 1116 | GVSNRAT | 1223 | CQQYNIWPRTF | 1418 |
| 014S-C05 | Fzd8 | RASQSISSYLN | 1098 | AASSLQS | 1175 | CQQSYSTPLTF | 1372 |
| 014S-D05 | Fzd8 | RASQSISSYLN | 1098 | AASSLQS | 1175 | CQQSYSTPLTF | 1372 |
| 014S-F05 | Fzd9 | RASQZVSRZZA | 1127 | GASTRAT | 1217 | CQQRSNWPITF | 1335 |
| 014S-G05 | Fzd9 | RVSQGISSALA | 1151 | AASSLQS | 1175 | CQQTFSVPWTF | 1384 |
| 014S-H05 | Fzd9 | RASQSISSYLN | 1098 | AASSLQS | 1175 | CQQSYSTPLTF | 1372 |
| 014S-A06 | Fzd9 | RASQSVSRNLA | 1114 | GASTRAT | 1217 | CQQRSNWPITF | 1335 |
| 014S-B06 | Fzd9 | RASQSISSYLN | 1098 | AASSLQS | 1175 | CQQSYSTPLTF | 1372 |
| 014S-C06 | Fzd10 | RASQSVSRNLA | 1114 | GASTRAT | 1217 | CQQRSNWPITF | 1335 |
| 014S-D06 | Fzd10 | RASQSISRYLN | 1095 | AASSLQS | 1175 | CQQRYSTPLTF | 1340 |
| 014S-F06 | Fzd10 | RASQSVGRWMA | 1107 | AASSLQS | 1175 | CQQANTFPFTF | 1321 |
| 014S-G06 | Fzd10 | RASQSISSYLN | 1098 | AASSLQS | 1175 | CQQSYSTPLTF | 1372 |
| 014S-H06 | Fzd10 | RASQSISSYLN | 1098 | AASSLQS | 1175 | CQQSYSTPLTF | 1372 |
| 014S-A07 | Fzd10 | RASQNIGSRLA | 1080 | GASNRAS | 1208 | CQQYNHWPPLFTF | 1417 |
| 017S-E08 | Fzd8 | | | | | | |
| 017S-H08 | Fzd8 | | | | | | |
| 017S-A09 | Fzd8 | | | | | | |
| 017S-B09 | Fzd8 | | | | | | |
| 017S-C09 | Fzd8 | | | | | | |
| 018S-D06 | Fzd4 | | | | | | |
| 018S-E06 | Fzd4 | | | | | | |
| 018S-F06 | Fzd4 | | | | | | |
| 018S-G06 | Fzd5 | | | | | | |
| 018S-H06 | Fzd5 | | | | | | |
| 018S-A07 | Fzd5 | | | | | | |
| 018S-B07 | Fzd5 | | | | | | |
| 018S-C07 | Fzd7 | | | | | | |
| 017S-F09 | Fzd4 | RSSRSLLHTSGYNY | 1147 | LGSNRAS | 1237 | CMQGTRWPTF | 1290 |
| | | LD | | | | | |
| 017S-G09 | Fzd4 | RSSRSLLHTNGYN | 1146 | LGSNRAS | 1237 | CMQALQTPLTF | 1281 |
| | | YLD | | | | | |
| 017S-H09 | Fzd5 | | | | | | |
| 017S-A10 | Fzd5 | | | | | | |
| 017S-B10 | Fzd5 | | | | | | |
| 017S-C10 | Fzd8 | | | | | | |
| 017S-D10 | Fzd8 | | | | | | |
| 017S-E10 | Fzd8 | | | | | | |
| 018S-D07 | Fzd1 | | | | | | |
| 018S-E07 | Fzd1 | | | | | | |
| 018S-F07 | Fzd1 | | | | | | |
| 018S-G07 | Fzd1 | | | | | | |
| 018S-H07 | Fzd4 | | | | | | |
| 018S-A08 | Fzd4 | | | | | | |
| 018S-B08 | Fzd4 | | | | | | |
| 018S-C08 | Fzd4 | | | | | | |
| 018S-D08 | Fzd5 | | | | | | |
| 018S-E08 | Fzd5 | | | | | | |
| 018S-F08 | Fzd5 | | | | | | |
| 018S-G08 | Fzd5 | | | | | | |
| 018S-H08 | Fzd5 | | | | | | |
| 018S-A09 | Fzd8 | | | | | | |
| 018S-B09 | Fzd8 | | | | | | |
| 018S-C09 | Fzd8 | | | | | | |
| 018S-D09 | Fzd8 | | | | | | |
| 018S-E09 | Fzd8 | | | | | | |
| 018S-F09 | Fzd8 | | | | | | |
| 018S-G09 | Fzd8 | | | | | | |
| 021S-A01 | Fzd8 | RASQSIGSSLH | 1087 | YASQSVS | 1260 | CHQSGRVPVTF | 1268 |
| 021S-C01 | Fzd1 | RSSRSLLDTDDGN | 1142 | TLSHRAS | 1259 | CMQSIQLPWTF | 1295 |
| | | TYLD | | | | | |
| 021S-D01 | Fzd1 | RSSQSLVHSDGNT | 1140 | KISNRFS | 1230 | CMQATQFPHTF | 1283 |
| | | YLS | | | | | |
| 021S-E02 | Fzd8 | QGDSLRTYYAS | 1052 | GKNNRPS | 1219 | CNSRDNSGKHKVF | 1300 |
| 021S-G02 | Fzd8 | RSSQSLLDSDDGN | 1133 | MLSSRAP | 1240 | CMQRLEFPYTF | 1294 |
| | | TYLD | | | | | |
| 021S-A03 | Fzd8 | RSSQNIFQSLN | 1131 | SASSLQS | 1254 | CQQSYNSPITF | 1349 |
| 022S-H06 | Fzd4 | RASQSISSYLN | 1098 | AASSLQS | 1175 | CQQSYSTPLTF | 1372 |
| 022S-A11 | Fzd10 | RASQGISNNIN | 1071 | AASNLET | 1166 | CQQTYSIPFTF | 1391 |
| OMP-18R5 | | SGDKLGKKYAS or | 1152 | EKDNRPSG | 1200 | SSFAGNSLE | 1435 |
| | | | or | or | or | or | or |
| | | SGDNIGSFYVH | 1153 | DKSNRPSG | 1201 | QSYANTLSL | 1436 |
| 027S-H02 | Fzd5 | RASQSVSSNYLS | 1118 | GASSRAP | 1212 | CQQRTNWPPRVTF | 1337 |
| 027S-B03 | Fzd8 | SGTSSNIGAGYDV | 1157 | GNNNRPS | 1219 | CSAWDDNLNGVVF | 1432 |
| | | H | | | | | |
| 027S-E01 | Fzd5 | | | | | | |
| 004S-D05 | Fzd5 | QASQDISNYLN | 1046 | AASSLQS | 1175 | CQQSYSTPLFTF | 1371 |
| 004S-D04 | Fzd5 | RASQSISSYLN | 1098 | AASSLQS | 1175 | CQQSYSTPLTF | 1372 |
| 004S-B05 | Fzd5 | RASQSISSYLN | 1098 | AASSLQS | 1175 | CQQSYSTPLTF | 1372 |
| 004S-G03 | Fzd5 | RASQSISSYLN | 1098 | AASSLQS | 1175 | CQQSYSTPLTF | 1372 |
| 004S-F03 | Fzd5 | KSSQSLLHSDGYT | 1036 | LGSNRAS | 1237 | CMQGLQTPWTF | 1286 |
| | | YLY | | | | | |
| 004S-C04 | Fzd5 | RATQTISTYLN | 1129 | AASRLQS | 1171 | CQQYYSYPWTS | 1427 |
| 004S-B06 | Fzd5 | RASQGISNNLN | 1072 | AASALQS | 1165 | CQHLNNFPLTF | 1303 |
| 004S-F06 | Fzd5 | RASQSISSYLN | 1098 | AASSLQS | 1175 | CQQSYSTPLTF | 1372 |
| 004S-A04 | Fzd5 | RASQGISNNLN | 1072 | GASSLQS | 1211 | CQQSHSSPRTF | 1346 |
| 004S-A05 | Fzd5 | RASQSISSYLN | 1098 | AASSLQS | 1175 | CQQSYSTPLTF | 1372 |
| 004S-F05 | Fzd5 | RSSQSLLHSDGYT | 1135 | LGSHRAS | 1235 | CMQGLQTPHTF | 1285 |
| | | YLY | | | | | |
| 003S-C01 | Fzd1 | RASQSISNNLN | 1092 | AASSLQS | 1175 | CQQSYNTPFTF | 1350 |
| 003S-H01 | Fzd1 | RASQSIGSNLD | 1085 | AASTLQS | 1179 | CQQNYATPRTF | 1333 |
| 003S-H02 | Fzd1 | RASQSISSYLN | 1098 | AASSLQS | 1175 | CQQSYSTPLTF | 1372 |
| 003S-H04 | Fzd1 | RASQGISNNLN | 1072 | AASSLQS | 1175 | CQQANSFPITF | 1316 |
| 003S-A05 | Fzd2 | TSSQSLLHSDGKT | 1162 | LGSNRAS | 1237 | CMQGTHWPYTF | 1289 |
| | | YLY | | | | | |
| 003S-B05 | Fzd2 | KSSQSLLHSDGKT | 1036 | LGSNRAS | 1237 | CMQSLQSPLTF | 1296 |
| | | YLY | | | | | |
| 003S-F05 | Fzd2 | KSSQSLLHSDGKT | 1036 | LGSNRAS | 1237 | CMQNTHWPLTR | 1293 |
| | | YLY | | | | | |
| 003S-G05 | Fzd2 | RSSRSLLHSNGNT | 1145 | LASRRAS | 1231 | CIQNTHWPLTR | 1270 |
| | | YLR | | | | | |
| 003S-H05 | Fzd2 | KSSQSLLHSDGKT | 1036 | MGSYRAS | 1239 | CMQGTHWPLTF | 1287 |
| | | YLY | | | | | |
| 003S-A07 | Fzd2 | KSSQSLLHSDGKT | 1036 | LGSNRAS | 1237 | CMQNTHWPLTL | 1292 |
| | | YLY | | | | | |
| 003S-C07 | Fzd2 | RTSQSVSSNLA | 1150 | DASNRAS | 1187 | CQQYGSSPYNF | 1412 |
| 003S-F07 | Fzd2 | RASQSISSYLN | 1098 | AASSLQS | 1175 | CQQSYSTPLTF | 1372 |
| 003S-G07 | Fzd2 | RASQAISSYLA | 1060 | KASTLDT | 1228 | CQQADTFPFTF | 1313 |
| 003S-B08 | Fzd2 | KSSQSLLHSDGKT | 1036 | LGSNRAS | 1237 | CMQTLKAPLTF | 1299 |
| | | YLY | | | | | |
| 003S-F08 | Fzd2 | RSSQYLSSAYLA | 1141 | GASSRAT | 1213 | CQQYGSSPTF | 1411 |
| 003S-H08 | Fzd2 | QASQGISNNLN | 1049 | AASSLQS | 1175 | CQQSYSTPAFTF | 1367 |
| 003S-A09 | Fzd2 | RSSQSLLHSDGYT | 1135 | LGSNRAS | 1237 | CMQGTHWPLTF | 1287 |
| | | YLY | | | | | |
| 003S-B09 | Fzd2 | RSSESLLHSDGKTY | 1130 | LGSNRAS | 1237 | CTQTVQFPITF | 1433 |
| | | LY | | | | | |
| 003S-C09 | Fzd2 | RASQGISNNLN | 1072 | SASNLQS | 1252 | CQQSYSTPWTF | 1378 |
| 003S-F09 | Fzd4 | RASQSISSYLN | 1098 | AASSLQS | 1175 | CQQSYSTPLTF | 1372 |
| 003S-H09 | Fzd4 | RASQSIGSNLN | 1086 | RASTLES | 1248 | CQQTYTTPRF | 1398 |
| 003S-A10 | Fzd4 | RASQGISNNLN | 1072 | YASSLQS | 1262 | CQQSHSPPGTF | 1345 |
| 003S-B10 | Fzd4 | RASQSISSYLN | 1098 | AASSLQS | 1175 | CQQSYSTPLTF | 1372 |
| 003S-G10 | Fzd4 | RASQSIVSYLN | 1104 | DASNLQS | 1186 | CQQGYSAPWTF | 1329 |
| 003S-611 | Fzd4 | RASQSISSYLN | 1098 | AASSLQS | 1175 | CQQSYSTPLTF | 1372 |
| 003S-C11 | Fzd4 | RASQSIGSNLD | 1085 | AASTLQS | 1179 | CQQSYSTPRTF | 1373 |
| 003S-D11 | Fzd4 | RASQSISSYLN | 1098 | AASSLQS | 1175 | CQQSYSTPLTF | 1372 |
| 003S-F11 | Fzd4 | RASQSISSYLN | 1098 | AASSLQS | 1175 | CQQSYSTPLTF | 1372 |
| 003S-E12 | Fzd4 | ZPZQTZZSHLN | 1164 | PASSLQS | 1242 | CQQSYSTPLTF | 1372 |
| 004S-A01 | Fzd4 | RASQGISNNLN | 1072 | AASTLQS | 1179 | CQQGNNFPFTF | 1326 |
| 004S-G01 | Fzd4 | RASQGISNNLN | 1072 | AASSLQS | 1175 | CQQYYTYPYTF | 1428 |
| 004S-C02 | Fzd4 | RASQSISSYLN | 1098 | AASSLQS | 1175 | CQQSYSTPLTF | 1372 |
| 004S-D02 | Fzd4 | RASQSISSYLN | 1098 | AASSLQS | 1175 | CQQSYSTPLTF | 1372 |
| 004S-A03 | Fzd4 | RASQGISNNLN | 1072 | DASNLET | 1185 | CHQSYSIPRTF | 1269 |
| 004S-B03 | Fzd4 | RASQDVDTWLA | 1066 | DASTLET | 1191 | CQQGYNIPWTF | 1328 |
| 004S-C03 | Fzd4 | QASQDISSYLN | 1047 | AASTLQS | 1179 | CQQAISFPLTF | 1315 |
| 004S-C05 | Fzd5 | RASQSISSYLN | 1098 | AASSLQS | 1175 | CQQSYSTPLTF | 1372 |
| 004S-G05 | Fzd5 | RASQSISSYLN | 1098 | AASSLQS | 1175 | CQQSYSTPLTF | 1372 |
| 004S-E06 | Fzd5 | QASQDISNYLN | 1046 | KASSLES | 1226 | CQQANSFPYTF | 1319 |
| 004S-C06 | Fzd5 | RSSQNVSSYLA | 1132 | GASTRAT | 1217 | CQHRANWPQTF | 1305 |
| 004S-E07 | Fzd6 | RASQSISSYLN | 1098 | AASSLQS | 1175 | CQQSYSTPLTF | 1372 |
| 004S-F07 | Fzd6 | QASQDITNYLN | 1048 | KASTLES | 1229 | CQQSYSAPYTF | 1356 |
| 004S-C08 | Fzd6 | RASQSISSYLN | 1098 | AASSLQS | 1175 | CQQSYSTPLTF | 1372 |
| 004S-F08 | Fzd6 | RASQSISZWLA | 1102 | EASTLQS | 1198 | CQQTYTPPFTF | 1397 |
| 004S-G09 | Fzd6 | RASQAISNSLA | 1058 | DASNLET | 1185 | CQQAYSFPWTF | 1324 |
| 004S-B10 | Fzd6 | RASQSISSYLN | 1098 | AASSLQS | 1175 | CQQSYSTPLTF | 1372 |
| 004S-H10 | Fzd6 | RASQSISTYLS | 1101 | GASSLES | 1210 | CQQSYSPPFTF | 1362 |
| 004S-B11 | Fzd6 | RASQSISSYLN | 1098 | AASSLQS | 1175 | CQQSYSTPLTF | 1372 |
| 004S-D11 | Fzd6 | RASQSVSSWLA | 1120 | AASTLQT | 1180 | CQQSYSTPTF | 1376 |
| 004S-F11 | Fzd6 | RASQSISSYLN | 1098 | AASSLQS | 1175 | CQQSYSTPLTF | 1372 |
| 004S-G11 | Fzd6 | RASQSVSSYLA | 1121 | GASSRAT | 1213 | CQQYAISYTF | 1400 |
| 004S-B12 | Fzd6 | RASQSISSYLN | 1098 | AASSLQS | 1175 | CQQSYSTPLTF | 1372 |
| 004S-C12 | Fzd6 | RASQGISSYLA | 1076 | RTSTLES | 1250 | CQQSYSTPWTF | 1378 |
| 004S-F12 | Fzd7 | RASQSISSYLN | 1098 | AASTLQT | 1180 | CQQSYSIPFTF | 1358 |
| 005S- B01 | Fzd7 | RASQSISSYLN | 1098 | AASSLQS | 1175 | CQQSYSTPLTF | 1372 |
| 005S-C01 | Fzd7 | RASQGISNNLN | 1072 | KASSLQS | 1227 | CQQSYSLPYTF | 1360 |
| 005S- F01 | Fzd7 | RASQSVSSSYLS | 1119 | GASSRAT | 1213 | CQQRYKSYTF | 1338 |
| 005S-B02 | Fzd8 | RASQSISSYLN | 1098 | AASSLQS | 1175 | CQQSYSTPLTF | 1372 |
| 005S-D02 | Fzd8 | RASQSVSSNLA | 1116 | NTSNRAT | 1241 | CQHYNNWPFTF | 1308 |
| 005S-G02 | Fzd8 | RASQSVSTNLA | 1122 | DASNRAT | 1188 | CQQRSNWPPQITF | 1336 |
| 005S-H02 | Fzd8 | QASQDISHYLN | 1044 | AASSLQS | 1175 | CQQSYSTPLTF | 1372 |
| 005S-B03 | Fzd8 | RASQSINSNLA | 1091 | GASSRAT | 1213 | CQQYGSSPYTF | 1413 |
| 005S-0O3 | Fzd8 | RASQSVSSSYLS | 1119 | DTSNRAT | 1194 | CQQYGSSPITF | 1408 |
| 005S-E03 | Fzd8 | RTSQSISSYLN | 1149 | AASTSQS | 1181 | CQQSFSSWTF | 1343 |
| 005S-F03 | Fzd8 | RASQSISSYLN | 1098 | AASSLQS | 1175 | CQQSYSTPLTF | 1372 |
| 005S-B04 | Fzd8 | QASHDINIALN | 1039 | AASSLQS | 1175 | CQQSYSSPLTF | 1365 |
| 005S-C04 | Fzd8 | RASQSISSYLN | 1098 | AASSLQS | 1175 | CQQSYSTPLTF | 1372 |
| 005S-D04 | Fzd8 | RASQSISSYLN | 1098 | AASSLQS | 1175 | CQQSYSTPLTF | 1372 |
| 005S-G04 | Fzd8 | RASQSISSYLN | 1098 | AASSLQS | 1175 | CQQSYSTPLTF | 1372 |
| 005S-A05 | Fzd8 | RASQSISSYLN | 1098 | AASSLQS | 1175 | CQQSYSTPLTF | 1372 |
| 005S-C05 | Fzd8 | RASQGISNNLN | 1072 | RASSLQS | 1247 | CQQANSYPLTF | 1320 |
| 005S-E05 | Fzd8 | RASQSISSYLN | 1098 | AASSLQS | 1175 | CQQSYSTPLTF | 1372 |
| 005S-C06 | Fzd8 | RASQSVSSSYLS | 1119 | AASRRAT | 1172 | CQQYSNWPFTF | 1424 |
| 005S-E06 | Fzd8 | QASQDISNRLN | 1045 | SASRLQI | 1253 | CQQSYRTPRTF | 1354 |
| 005S-G06 | Fzd8 | RASQSISSYLN | 1098 | AASSLQS | 1175 | CQQSYSTPLTF | 1372 |
| 005S-H06 | Fzd8 | RASQGISNNLN | 1072 | DASTLQT | 1193 | CQQSFSAPITF | 1342 |
| 005S-A08 | Fzd9 | RASQSISSKSLA | 1097 | GASTRAT | 1217 | CQQYGIAPTF | 1407 |
| 005S-C08 | Fzd9 | RASQSISSYLN | 1098 | AASSLQS | 1175 | CQQSYSTPLTF | 1372 |
| 005S-E08 | Fzd9 | RASQSISSYLN | 1098 | AASSLQS | 1175 | CQQSYSTPLTF | 1372 |
| 005S-F08 | Fzd9 | QASQGISNYLN | 1050 | AASSLQS | 1175 | CQQTYSTPTTF | 1395 |
| 005S-H08 | Fzd9 | RASQSISSYLN | 1098 | AASSLQS | 1175 | CQQSYSTPLTF | 1372 |
| 005S-A09 | Fzd9 | RASQSIGSNLD | 1085 | RASTLQS | 1249 | CQQSYSTPSF | 1375 |
| 005S-F09 | Fzd9 | RASQSISSYLN | 1098 | AASSLQS | 1175 | CQQSYSTPLTF | 1372 |
| 005S-B10 | Fzd9 | RASQGISNNLN | 1072 | AASSLQS | 1175 | CQQGNNFPLTF | 1327 |
| 005S-C10 | Fzd9 | RASQDIGSFLA | 1061 | AASSLQS | 1175 | CQKYNRAPFTF | 1310 |
| 005S-E10 | Fzd9 | RASQSISSYLN | 1098 | AASSLQS | 1175 | CQQSYSTPLTF | 1372 |
| 005S-F10 | Fzd9 | RASQSISSYLN | 1098 | AASSLQS | 1175 | CQQSYSTPLTF | 1372 |
| 005S-G10 | Fzd9 | RASQGISNNLN | 1072 | QASSLDS | 1244 | CQQSYNVPYTF | 1352 |
| 005S-A11 | Fzd9 | RASQSISNNLN | 1092 | DASTLKR | 1192 | CQQSYNTPRTF | 1350 |
| 005S-B12 | Fzd10 | RASQSISSYLN | 1098 | AASSLQS | 1175 | CQQSYSTPLTF | 1372 |
| 005S-D12 | Fzd10 | RASQSVSTSYLA | 1123 | GASTRAT | 1217 | CQQYGASPWTF | 1406 |
| 006S-B01 | Fzd10 | RASQSISSYLN | 1098 | AASSLQS | 1175 | CQQSYSTPLTF | 1372 |
| 006S-C01 | Fzd10 | RASQGISSALA | 1076 | SASNLQS | 1252 | CQQAISFPLTF | 1315 |
| 006S-E01 | Fzd10 | RASQSVTSSLA | 1124 | GASTRAT | 1217 | CQQYNDWPPTF | 1416 |
| 006S-G01 | Fzd10 | KSSQSVLYSSNNK | 1037 | STNTRSS | 1257 | CQHRNFF | 1306 |
| | | NYLA | | | | | |
| 006S-602 | Fzd10 | RASQSISSYLN | 1098 | AASSLQS | 1175 | CQQSYSTPLTF | 1372 |
| 006S-G02 | Fzd10 | RASQSISSYLN | 1098 | AASSLQS | 1175 | CQQSYSTPLTF | 1372 |
| 014S-A01 | Fzd1 | RASQSISSYLN | 1098 | AASSLQS | 1175 | CQQSYSTPLTF | 1372 |
| 014S-C01 | Fzd2 | RSSQSLLHSDGKT | 1134 | LGSNRAS | 1237 | CMQNTHWPLTR | 1293 |
| | | YLY | | | | | |
| 014S-F01 | Fzd4 | RASQSISSYLN | 1098 | AASSLQS | 1175 | CQQSYSTPLTF | 1372 |
| 014S-H01 | Fzd4 | RASQGISNNLN | 1072 | AASRLQS | 1171 | CQQSYSPPLTF | 1363 |
| 014S-C03 | Fzd7 | RASQSISSYLN | 1098 | AASSLQS | 1175 | CQQSYSTPLTF | 1372 |
| 014S-D03 | Fzd7 | RASQSISSYLN | 1098 | AASSLQS | 1175 | CQQSYSTPLTF | 1372 |
| 014S-F03 | Fzd8 | RASQSISSYLN | 1098 | AASSLQS | 1175 | CQQSYSTPLTF | 1372 |
| 014S-A04 | Fzd8 | RASQSISSYLN | 1098 | AASSLQS | 1175 | CQQSYSTPLTF | 1372 |
| 014S-C04 | Fzd8 | RASQSISSYLN | 1098 | AASSLQS | 1175 | CQQSYSTPLTF | 1372 |
| 014S-D04 | Fzd8 | RASQSISSYLN | 1098 | AASSLQS | 1175 | CQQSYSTPLTF | 1372 |
| 014S-E05 | Fzd8 | RASQSISSYLN | 1098 | AASSLQS | 1175 | CQQSYSTPLTF | 1372 |
| 014S-E06 | Fzd10 | RASQSISRYLN | 1095 | AASSLQS | 1175 | CLQHHSYPFTF | 1275 |
| 027S-0O2 | Fzd5 | QASQDISNYLN | 1046 | AASSLHT | 1173 | CQESYSSPYTF | 1302 |
| 027S-E03 | Fzd8 | RASQSISSYLN | 1098 | AASSLQS | 1175 | CQQSYSTPYTF | 1379 |
| 027S-F03 | Fzd8 | RASHDIGTFLA | 1057 | AASTLQS | 1179 | CQQSYRTPYTF | 1355 |
| 027S-G03 | Fzd8 | QATQNIKKYLN | 1051 | KASTLES | 1229 | CQQSYSTPLTF | 1372 |
| 027S-H03 | Fzd8 | RSSQ5LLHSNGYN | 1138 | LGSNRAS | 1237 | CMQALQTPQTF | 1282 |
| | | YLD | | | | | |
| 027S-A04 | Fzd8 | RASQSISRSLA | 1093 | AASNLQS | 1169 | CQQAYSFPQTF | 1323 |
| 027S-B04 | Fzd8 | RASQAISNYLN | 1059 | AASSLQS | 1175 | CQQTFSPPLTF | 1383 |
| 027S-C04 | Fzd8 | RASQGINNYLA | 1067 | QASNLES | 1243 | CQQTYSSPLTF | 1393 |
| 027S-D04 | Fzd8 | QASQDIDNYLN | 1040 | AASSLQS | 1175 | CQQSYSTPVTF | 1377 |
| 027S-E04 | Fzd8 | RASQGIRNDLG | 1069 | AASTLQS | 1179 | CQQAYSFPWTF | 1324 |
| 027S-C05 | Fzd8 | RASQGIRNDLA | 1068 | AASSLQR | 1174 | CQQSYSKPTF | 1359 |
| 027S-D05 | Fzd8 | QASQDISNYLN | 1046 | ASSTLQT | 1182 | CQQSYSAPYTF | 1356 |
| 027S-E05 | Fzd8 | RASQGITKSLA | 1077 | AASNLQL | 1168 | CQQYNTFPITF | 1422 |
| 027S-F05 | Fzd8 | RASQSISTYLA | 1100 | GASTRAT | 1217 | CQQYGSSPTF | 1411 |
| 027S-G05 | Fzd8 | RASQSISSYLN | 1098 | YASSLQN | 1261 | CQQSYSTPFTF | 1368 |
| 027S-H05 | Fzd8 | RASQSIGTYLN | 1088 | DASNLET | 1185 | CQQANSFPLTF | 1317 |
| 027S-A06 | Fzd8 | RASQGISNNLN | 1072 | KASSLES | 1226 | CQQANSFPITF | 1316 |
| 027S-C06 | Fzd8 | RASQGVGDYLA | 1078 | DASNLQS | 1186 | CQQHNAYPLTF | 1330 |
| 027S-D06 | Fzd8 | RASQDISSWLA | 1064 | KASTLES | 1229 | CQQSYGAPLTF | 1348 |
| 027S-E06 | Fzd8 | RASQNVNDWLA | 1082 | SASNLQS | 1252 | CQQSYSTPFTF | 1368 |
| 027S-F06 | Fzd8 | RASQSISSYLN | 1098 | GASNLQS | 1207 | CQQSYSTPLTF | 1372 |
| 027S-G06 | Fzd5 | RASQSVNNTYVA | 1111 | GTSTRAT | 1222 | CQQYDTSPPTF | 1404 |
| 027S-H06 | Fzd5 | RASQSISSYLN | 1098 | AASSLQS | 1175 | CQQSYTTPFTF | 1382 |
| 027S-A07 | Fzd5 | RASQSISTNVN | 1099 | AASSLQS | 1175 | CQQSYSTPYTF | 1379 |
| 029S-B01 | Fzd1 | KSSQSVLHSSNNK | 1498 | STNTRSS | 1257 | CQQYYSTPFTF | 1544 |
| | | NYLA | | | | | |
| 029S-D01 | Fzd2 | RASQSLSSWLA | 1512 | DASTLQS | 1520 | CQQAISFPLTF | 1315 |
| 029S-C02 | Fzd2 | RASQDISNNLN | 1500 | GASHLQT | 1522 | CQQANSFPVTF | 1318 |
| 029S-F02 | Fzd2 | RASQGISNYLA | 1074 | AASRLQT | 1515 | CLQYNTYPWTF | 1528 |
| 029S-H02 | Fzd2 | RSSQSLLHSNGYN | 1138 | LGSSRAS | 1525 | CMQALQTPLTF | 1281 |
| | | YLD | | | | | |
| 030S-A02 | Fzd7 | RASQSISSYLN | 1098 | KASTLHN | 1523 | CQQAISFPLTF | 1315 |
| 030S-B02 | Fzd3 | RASQSITTYLN | 1511 | KTSSLQS | 1524 | CQQGDSFPYTF | 1531 |
| 029S-E03 | Fzd3 | RASQSISSYLN | 1098 | AASSLQT | 1516 | CQQSFRLPLTF | 1532 |
| 029S-G03 | Fzd3 | RASQSIISYLN | 1509 | AASSLQS | 1175 | CQQSWRFPYTF | 1535 |
| 030S-E03 | Fzd3 | KSSQSVLYSSNNK | 1037 | WASTRES | 1526 | CQQYYSTPPTF | 1545 |
| | | NYLA | | | | | |
| 029S-D05 | Fzd3 | RASQTISSYLN | 1513 | DASNLET | 1185 | CQQSYSIPLTF | 1536 |
| 030S-H03 | Fzd3 | RASQGVSTYLA | 1505 | AASSLQS | 1175 | CQQYYSSPQTF | 1543 |
| 029S-B06 | Fzd3 | RASQSVSSWLA | 1120 | AASSLQS | 1175 | CQQAFRFPPTF | 1529 |
| 029S-E06 | Fzd3 | RASQNINSWLA | 1506 | AASSLQS | 1175 | CQQYYSFPLTF | 1542 |
| 029S-H06 | Fzd3 | RASQSISSYLN | 1098 | AASSLQS | 1175 | CQQSHSTPLTF | 1533 |
| 029S-G07 | Fzd3 | RASQSISKWLA | 1510 | GASTLQS | 1215 | CQQAYSFPWTF | 1324 |
| 029S-H08 | Fzd3 | RASRTVYNFLA | 1514 | DASNLRT | 1519 | CQQSYSTPPTF | 1537 |
| 029S-F09 | Fzd3 | RASQSIARYLN | 1507 | GASSLQS | 1211 | CQQSYNTPWTF | 1351 |
| 030S-F04 | Fzd3 | RASQGIRNDLN | 1502 | DASNLGT | 1518 | CQQSSRIPPTF | 1534 |
| 029S-A10 | Fzd3 | RASQGISKYLA | 1503 | AASSLQS | 1175 | CQQSYSTPWTF | 1538 |
| 029S-B11 | Fzd3 | QASQDISNYLN | 1046 | GASALRS | 1521 | CQQTKSFPLTF | 1540 |
| 029S-D11 | Fzd3 | RASQDISRGLG | 1501 | AASTLYR | 1517 | CQQAYSFPWTF | 1324 |
| 030S-H05 | Fzd7 | RASQSIGNYLN | 1508 | AASSLQS | 1175 | CQQANSFPLTF | 1530 |
| 030S-A06 | Fzd7 | RASQAIGRRLA | 1499 | AASSLQS | 1175 | CQQYDTYWTF | 1541 |
| 029S-C12 | Fzd7 | RASQGISSYLA | 1076 | AASTLQS | 1179 | CLQYNTYPWTF | 1528 |
| 030S-C06 | Fzd7 | RASQGISSWLA | 1504 | DASSLQS | 1190 | CQQSYSTPYSF | 1539 |
| 4A12 | Fzd5 | KASQDVGTAVA | 1497 | WASTRHT | 1527 | QQYSTYPLT | 1546 |
| 1791 | Fzd7 | KASENVLNYVS | 2199 | GASNRYT | 2202 | GQSYRYP | 2205 |
| 1291 | Fzd7 | KSSQSLLYSSNQ | 2200 | WASTRES | 2203 | QQYYSY | 2206 |
| | | KNYLAW | | | | | |
| 18R5 | Fzd7 | SGDNIGS | 2201 | DKSNRPSG | 2204 | QSYA | 2207 |
| | | FYVH | | | | NTLSL | |

TABLE 1B
Anti-Fzd Antibody Clone IDs, Heavy Chain (HC) and Light
Chain (LC) Seq ID Nos, and Binding Characteristics

| Clone ID | HC SID NO | LC SID NO | Confirmed Binding |
|---|---|---|---|
| 001S-B01 | 1 | 38 | Fzd1, 2, 7, 9 |
| 001S-E02 | 2 | 39 | Fzd1, 2, 7 |
| 001S-G02 | 3 | 40 | Fzd1, 2, 7 |
| 001S-H02 | 4 | 41 | Fzd1, 2, 7 |
| 001S-A03 | 5 | 42 | Fzd1, 2, 7, 9 |
| 001S-B03 | 6 | 43 | Fzd1, 2, 7 |
| 004S-G06 | 7 | 44 | Fzd5, 8 |
| 002S-B01 | 8 | | Fzd1 |
| 002S-C02 | 9 | | Fzd1 |
| 002S-E02 | 10 | | Fzd1 |
| 002S-G02 | 11 | | Fzd1 |
| 002S-F03 | 12 | | Fzd1 |
| 002S-A04 | 13 | | Fzd1 |
| 002S-B04 | 14 | | Fzd1 |
| 002S-D04 | 15 | | Fzd1 |
| 004S-H04 | 16 | 45 | Fzd5 |
| 001S-A04 | 17 | 46 | Fzd1, 2, 5, 7, 8 |
| 003S-E07 | 18 | 47 | Fzd2 |
| 003S-D10 | 19 | 48 | Fzd4 |
| 004S-B08 | 20 | 49 | Fzd6 |
| 004S-D08 | 21 | 50 | Fzd6 |
| 004S-C09 | 22 | 51 | Fzd6 |
| 004S-F10 | 23 | 52 | Fzd6 |
| 004S-A11 | 24 | 53 | Fzd6 |
| 004S-A12 | 25 | 54 | Fzd6 |
| 005S-B07 | 26 | 55 | Fzd9 |
| 005S-D08 | 27 | 56 | Fzd9 |
| 005S-E09 | 28 | 57 | Fzd9 |
| 005S-H10 | 29 | 58 | Fzd9 |
| 005S-B11 | 30 | 59 | Fzd9 |
| 005S-D11 | 31 | 60 | Fzd9 |
| 014S-G02 | 32 | 61 | Fzd6 |
| 014S-B04 | 33 | 62 | Fzd8 |
| 014S-B06 | 34 | 63 | Fzd9 |
| 014S-G06 | 35 | 64 | Fzd10 |
| 014S-A07 | 36 | 65 | Fzd10 |
| 017S-B09 | 37 | | Fzd8 |
| 004S-D01 | 66 | 67 | Fzd4 |
| 004S-E09 | 68 | 69 | Fzd6 |
| anti-FZD7-1791 | 70 | 71 | Fzd7 |
| anti-FZD7-1291 | 72 | 73 | Fzd7 |
| 004S-B10 | | | Fzd6 |
| 004S-C10 | | | Fzd6 |
| 004S-F10 | | | Fzd6 |
| 004S-G10 | | | Fzd6 |
| 004S-A11 | | | Fzd6 |
| 004S-B11 | | | n.b. |
| 004S-D11 | | | Fzd6 |
| 004S-E11 | | | n.b. |
| 004S-F11 | | | Fzd6 |
| 004S-G11 | | | Fzd6 |
| 004S-A12 | | | Fzd6 |
| 004S-B12 | | | Fzd6 |
| 004S-C12 | | | n.b. |
| 004S-D12 | | | n.b. |
| 004S-F12 | | | n.b. |
| 004S-F12 | | | n.b. |
| 004S-G12 | | | n.b. |
| 005S-B02 | | | n.b. |
| 005S-C02 | | | n.b. |
| 005S-D02 | | | Fzd5, 8 |
| 005S-E02 | | | Fzd5, 8 |
| 005S-H02 | | | Fzd5, 8 |
| 005S-A03 | | | Fzd5, 8 |
| 005S-C03 | | | n.s. |
| 005S-E03 | | | n.s. |
| 005S-F03 | | | Fzd8 |
| 005S-B04 | | | Fzd5, 8 |
| 005S-F04 | | | n.b. |
| 005S-G04 | | | Fzd5, 8 |
| 005S-H04 | | | n.b. |
| 005S-E05 | | | n.b. |
| 005S-G05 | | | Fzd5, 8 |
| 005S-H05 | | | Fzd5, 8 |
| 005S-D06 | | | Fzd8 |
| 005S-F06 | | | n.b. |
| 005S-G06 | | | n.b. |
| 005S-A07 | | | Fzd9, 10 |
| 005S-B07 | | | Fzd9 |
| 005S-A08 | | | Fzd9 |
| 005S-B08 | | | Fzd9 |
| 005S-D08 | | | Fzd9 |
| 005S-E08 | | | Fzd9 |
| 005S-F08 | | | n.b. |
| 005S-C09 | | | Fzd9 |
| 005S-D09 | | | Fzd9 |
| 005S-E09 | | | Fzd9 |
| 005S-F09 | | | Fzd9 |
| 005S-A10 | | | Fzd9 |
| 005S-B10 | | | Fzd9 |
| 005S-E10 | | | Fzd9 |
| 005S-H10 | | | Fzd9 |
| 005S-B11 | | | Fzd9 |
| 005S-D11 | | | Fzd9 |
| 005S-G11 | | | n.b. |
| 005S-H11 | | | n.b. |
| 005S-E12 | | | Fzd10 |
| 006S-A01 | | | Fzd10 |
| 006S-H01 | | | n.b. |
| 006S-A02 | | | Fzd10 |
| 006S-D02 | | | n.b. |
| 006S-H02 | | | Fzd10 |
| 006S-A03 | | | n.b. |
| 006S-B03 | | | n.b. |
| 006S-C03 | | | n.b. |
| 014S-A01 | | | Fzd1, 2, 7 |
| 014S-B02 | | | n.b. |
| 014S-G02 | | | Fzd6 |
| 014S-B03 | | | n.b. |
| 014S-C03 | | | Fzd1, 2, 7 |
| 014S-A04 | | | n.b. |
| 014S-B04 | | | Fzd8 |
| 014S-B05 | | | Fzd5, 8 |
| 014S-B06 | | | Fzd9 |
| 014S-F06 | | | n.s. |
| 014S-G06 | | | Fzd10 |
| 014S-A07 | | | Fzd10 |
| 017S-E08 | | | Fzd8 |
| 017S-H08 | | | n.b. |
| 017S-A09 | | | n.b. |
| 017S-B09 | | | Fzd8 |
| 018S-F06 | | | Fzd4 |
| 018S-H06 | | | n.b. |
| 018S-B07 | | | n.b. |
| 017S-A10 | | | n.b. |
| 017S-B10 | | | n.b. |
| 017S-D10 | | | n.b. |
| 018S-H08 | | | n.b. |
| 018S-B09 | | | Fzd5, 8 |
| 021S-A01 | | | n.b. |
| 021S-E02 | | | Fzd5, 8 |
| 021S-G02 | | | n.s. |
| 021S-A03 | | | n.b. |
| 029S-B01 | | | n.b. |
| 029S-D01 | | | Fzd1, 2, 7 |
| 029S-C02 | | | Fzd1, 2, 7 |
| 029S-H02 | | | Fzd1 |
| 030S-A02 | | | Fzd7 |
| 029S-E06 | | | Fzd2, 6, 3 |
| 030S-F04 | | | Fzd3 |
| 030S-H05 | | | Fzd7 |
| 030S-A06 | | | Fzd1, 2, 7, 5 |
| 029S-C12 | | | Fzd7 |
| 030S-C06 | | | Fzd1 |
| 001S-A01 | | | Fzd1, 2, 7 |
| 001S-H01 | | | Fzd1, 2, 7 |

[0151] In certain embodiments, the Fzd binding region may be selected from any binding domain that binds an Fzd receptor epitope with an affinity of, e.g., a K_{D} of at least about 1×10⁻⁴ M, at least about 1×10⁻⁵ M, at least about 1×10⁻⁶ M, at least about 1×10⁻⁷ M, at least about 1×10⁻⁸ M, at least about 1×10⁻⁹ M, at least about 1×10⁻¹⁹ M, at least about 1×10⁻¹¹ M, at least about 1×10⁻¹² M, at least about 1×10⁻¹³ M, at least about 1×10⁻¹⁴ M, or at least about 1×10⁻¹⁵ M. In certain embodiment, the Fzd binding region may be selected from any binding domain that binds one or more Fzd receptor epitopes at high affinity, e.g., a K_{D} of less than about 1×10⁻⁷ M, less than about 1×10⁻⁸ M, less than about 1×10⁻⁹ M, less than about 1×10⁻¹⁶ M, less than about 1×10⁻¹¹ M, less than about 1×10⁻¹² M, less than about 1×10⁻¹³ M, less than about 1×10⁻¹⁴ M, or less than about 1×10⁻¹⁵ M. In certain embodiment, the Fzd binding region may be selected from any binding domain that binds an Fzd receptor epitope at high affinity, e.g. a K_{D} of less than or equal to about 1×10⁻⁴ M, less than or equal to about 1×10⁻⁵ M, less than or equal to about 1×10⁻⁶ M, less than or equal to about 1×10⁻⁷ M, less than or equal to about 1×10⁻⁸ M, less than or equal to about 1×10⁻⁹ M, less than or equal to about 1×10⁻¹⁶ M, less than or equal to about 1×10⁻¹¹ M, less than or equal to about 1×10⁻¹² M, less than or equal to about 1×10⁻¹³ M, less than or equal to about 1×10⁻¹⁴ M, or less than or equal to about 1×10⁻¹⁵ M in the context of a Wnt surrogate molecule.

[0152] Suitable Fzd binding regions include, without limitation, de novo designed Fzd binding proteins, antibody derived binding proteins, e.g. scFv, Fab, etc. and other portions of antibodies that specifically bind to one or more Fzd proteins, VHH or sdAb derived binding domains, knottin-based engineered scaffolds, norrin and engineered binding fragments derived therefrom, naturally occurring Fzd binding domains, and the like. An Fzd binding domain may be affinity selected to enhance binding to a desired Fzd protein or plurality of Fzd proteins, e.g. to provide tissue selectivity.

[0153] In some embodiments, the Fzd binding region binds to one, two, three, four, five or more different frizzled proteins, e.g., one or more of human frizzled proteins Fzd1, Fzd2, Fzd3, Fzd4, Fzd5, Fzd6, Fzd7, Fzd8, Fzd9, and Fzd10. In some embodiments, the Fzd binding region binds to Fzd1, Fzd2, and Fzd 7. In some embodiments, the Fzd binding region binds to Fzd1, Fzd2, Fzd5, Fzd7, and Fzd8. In other embodiments the Fzd binding region is selective for one or more frizzled protein of interest, e.g. having a specificity for the one or more desired frizzled protein of at least 10-fold, 25-fold, 50-fold, 100-fold, 200-fold or more relative to other frizzled proteins.

[0154] In certain embodiments, the Fzd binding region comprises the six CDR regions of the pan specific frizzled antibody OMP-18R5 (vantictumab). In certain embodiments, the Fzd binding region is an scFv comprising the six CDR regions of the pan-specific frizzled antibody OMP-18R5 (vantictumab). See, for example, U.S. Pat. No. 8,507,442, herein specifically incorporated by reference. For example, the CDR sequences of OMP-18R5 include (i) a heavy chain CDR1 comprising GFTFSHYTLS (SEQ ID NO:270), a heavy chain CDR2 comprising VISGDGSYTYYADSVKG (SEQ ID NO:677), and a heavy chain CDR3 comprising NFIKYVFAN (SEQ ID NO:1033), and (ii) a light chain CDR1 comprising SGDKLGKKYAS (SEQ ID NO:1152) or SGDNIGSFYVH (SEQ ID NO:1153), a light chain CDR2 comprising EKDNRPSG (SEQ ID NO:1200) or DKSNRPSG (SEQ ID NO:1201), and a light chain CDR3 comprising SSFAGNSLE (SEQ ID NO:1435) or QSYANTLSL (SEQ ID NO:1436). In particular embodiments, the Fzd binding region is an antibody or derivative thereof, including without limitation scFv, minibodies, VHH or sdAbs and various antibody mimetics comprising any of these CDR sequences. In certain embodiments, these CDR sequences comprise one or more amino acid modifications.

[0155] In certain embodiments, the Fzd binding region comprises the six CDR regions of anti-FZD7-1791 or anti-FZD7-1291. Anti-FZD7-1791 and anti-FZD7-1291 are antibodies that bind to different epitopes within the hinge region of Fzd7, as described in PCT Patent Publication Nos. WO2016/205551 and WO2016/205566, herein specifically incorporated by reference. In certain embodiments, the Fzd binding region is an scFv comprising the six CDR regions of anti-FZD7-1791 or anti-FZD7-1291. For example, the CDR sequences of anti-FZD7-1791 include (i) a heavy chain CDR1 comprising TYAMH (SEQ ID NO:2190), a heavy chain CDR2 comprising RIRSKSNNYAKNYDDSVKD (SEQ ID NO:2193), and a heavy chain CDR3 comprising ENYGGRFDY (SEQ ID NO:2196), and (ii) a light chain CDR1 comprising KASENVLNYVS (SEQ ID NO:2199), a light chain CDR2 comprising GASNRYT (SEQ ID NO:2202), and a light chain CDR3 comprising GQSYRYP (SEQ ID NO:2205). The heavy chain sequence of anti-FZD7-1791 includes SEQ ID NO:70 and the light chain sequence of anti-FZD7-1791 includes SEQ ID NO:71. As another example, the CDR sequences of anti-FZD7-1291 include (i) a heavy chain CDR1 comprising SYAMS (SEQ ID NO:2191), a heavy chain CDR2 comprising TISDGGSYTRYPDKLKG (SEQ ID NO:2194), and a heavy chain CDR3 comprising VGGRRDYFDY (SEQ ID NO:2197), and (ii) a light chain CDR1 comprising KSSQSLLYSSNQKNYLAW (SEQ ID NO:2200), a light chain CDR2 comprising WASTRES (SEQ ID NO:2203), and a light chain CDR3 comprising QQYYSYP (SEQ ID NO:2206). The heavy chain sequence of anti-FZD7-1291 includes SEQ ID NO:72 and the light chain sequence of anti-FZD7-1291 includes SEQ ID NO:73. In some embodiments, In particular embodiments, the Fzd binding region is an antibody or derivative thereof, including without limitation scFv, minibodies, VHH or sdAbs and various antibody mimetics comprising any of these CDR sequences. In certain embodiments, these CDR sequences comprise one or more amino acid modifications.

[0156] In other embodiments, the Fzd binding region comprises a variable region sequence, or the CDRs thereof, from any of a number of frizzled specific antibodies, which are known in the art and are commercially available, or can be generated de novo. Any of the frizzled polypeptides can be used as an immunogen or in screening assays to develop an antibody. Non-limiting examples of frizzled binding domains include antibodies available from Biolegend, e.g., Clone CH3A4A7 specific for human frizzled 4 (CD344); Clone W3C4E11 specific for human Fzd9 (CD349); antibodies available from Abcam, e.g., ab64636 specific for Fzd7; ab83042 specific for human Fzd4; ab77379 specific for human Fzd7; ab75235 specific for human Fzd8; ab102956 specific for human Fzd9; and the like. Other examples of suitable antibodies are described in, inter alia, U.S. Patent Application No. 20140105917; U.S. Patent Application No. 20130230521; U.S. Patent Application No. 20080267955; U.S. Patent Application No. 20080038272; U.S. Patent Application No. 20030044409; etc., each herein specifically incorporated by reference.

[0157] The Fzd binding region of a Wnt surrogate molecule may be an engineered protein that is selected for structural homology to the frizzled binding region of a Wnt protein. Such proteins can be identified by screening a structure database for homologies. The initial protein thus identified, for example the microbial Bh1478 protein. The native protein is then engineered to provide amino acid substitutions that increase affinity, and may further be selected by affinity maturation for increased affinity and selectivity in binding to the desired frizzled protein. Non-limiting examples of frizzled binding moieties include the Fz27 and Fz27-B12 proteins.

[0158] In particular embodiments, a Wnt surrogate molecule comprises an LRP5/6 binding region, e.g., an anti-LRP5/6 antibody, or antigen-binding fragment thereof, fused to a polypeptide that specifically binds to one or more Fzd receptor epitopes. In particular embodiments, the polypeptide that specifically binds to LRP5/6 is an antibody or antigen-binding fragment thereof. If certain embodiments, it is an antibody or antigen-binding fragment thereof disclosed in the U.S. Provisional Patent Application No. 62/607,879, titled, “Anti-LR5/6 Antibodies and Methods of Use,” Attorney Docket No. SRZN-005/00US, filed on Dec. 19, 2017, which is incorporated herein by reference in its entirety.

[0159] In particular embodiments, at least one LRP5/6 binding region of a Wnt surrogate molecule includes one or more antigen-binding fragments of an antibody. For example, the one or more antigen-binding fragments may be or be derived from an IgG, scFv, Fab, or VHH or sdAb. In certain embodiments, the one or more antigen-binding fragments are humanized.

[0160] In particular embodiments, the LRP5/6 binding region comprises the three heavy chain CDRs and/or the three light chain CDRs disclosed for any of the illustrative antibodies or fragments thereof that bind to LRP5 and/or LRP6 provided in Table 2A. In particular embodiments, the LRP5/6 binding region comprises the three heavy chain CDRs and/or the three light chain CDRs disclosed for any of the illustrative antibodies or fragments thereof that bind to LRP5 and/or LRP6 provided in Table 2A, wherein the CDRs collectively comprise one, two, three, four, five, six, seven, or eight amino acid modifications, e.g., substitutions, deletions, or additions. In certain embodiments, the LRP5/6 binding region is a VHH or sdAb or was derived from a VHH or sdAb, so Table 2A only includes the three heavy chain CDRs. In certain embodiments, the LRP5/6 binding region comprises the three heavy chain CDRs shown in Table 2A or variants wherein the CDRs collectively comprise one, two, three, four, five, six, seven or eight amino acid modifications. In particular embodiments, the LRP5/6 binding region comprises the heavy chain fragment and/or light chain fragment of any of the illustrative antibodies or fragments thereof that bind to LRP5 and/or LRP6 provided in Table 2B or SEQ ID NOs:74-97 (or an antigen-binding fragment or variant of either). In certain embodiments, the LRP5/6 binding region is a Fab or was derived from a Fab, so Table 2B includes VH and CH1 sequence, but not CH2 or CH3 sequences. In certain embodiments, the LRP5/6 binding region is a VHH or sdAb or was derived from a VHH or sdAb, so Table 2B includes the VHH domain. In certain embodiments, the LRP5/6 binding region is a polypeptide, e.g., an antibody or antigen-binding fragment thereof, that competes with one of these antibodies for binding to LRP5 and/or LRP6.

[0161] In particular embodiments, the LRP5/6 binding region includes an amino acid sequence having at least 90%, at least 95%, at least 98%, or at least 99% identity to any of the sequences set forth in Table 2A, Table 2B, or SEQ ID NOs:74-97, or an antigen-binding fragment thereof. Binding characteristics for clones listed in Table 2B were determined and are shown in Table 2B.

TABLE 2A
Anti-LRP5/6 Antibody Clone IDs and CDR sequences.

| | Confirmed | | | | SID | | SID |
|---|---|---|---|---|---|---|---|
| Clone ID | Binding | CDRH1 | SID NO. | CDRH2 | NO. | CDRH3 | NO. |
| 001S-008 | LRP6e1e2 | YTISNYYIH | 1682 | GMINPSGGSTTYA | 1762 | CAIVRGKKWYFDLW | 1842 |
| 001S-C10 | LRP6e1e2 | RTFGTYPNG | 1632 | AAISWGGRTAYA | 1700 | CYARTVIGGFGAFRAHW | 2061 |
| 001S-D10 | LRP6e1e2 | RTFSRYAMA | 1642 | AAIRWSGGGTYYA | 1689 | CAASMEAMNSLRVNKERYYQ | 1836 |
| | | | | | | SW | |
| 001S-E10 | LRP6e1e2 | LTFSNAAMA | 1614 | AAISRSGANTAYS | 1696 | CTLVNEIKTWW | 2039 |
| 001S-F10 | LRP6e1e2 | RTFSSYAMA | 1645 | AAIKWSGTNTYYA | 1684 | CAASMEAMNSLRVNKERYYQ | 1834 |
| | | | | | | SW | |
| 001S-G10 | LRP6e1e2 | RTFSRYVMG | 1644 | AAITWRGGSTYYA | 1706 | CATGPNSIY | 1987 |
| 001S-A11 | LRP6e1e2 | RTFGNYDMG | 1630 | AGIRWSGSTLYA | 1709 | CYARTVIGGFGAFRAHW | 2062 |
| 001S-B11 | LRP6e1e2 | RRFTTYGMG | 1623 | AAVTWRSGSTYYA | 1708 | CAAGSTVVAEFNYW | 1828 |
| 001S-C11 | LRP6e1e2 | SISSFNTMG | 1659 | AVITTGGDTSYS | 1741 | CNKVNAITKL | 2025 |
| 001S-E11 | LRP6e1e2 | RTLSRYSMG | 1651 | AAISRSGDRIYYS | 1697 | CTLVNEIKTWW | 2040 |
| 001S-F11 | LRP6e1e2 | RTFSSYAMS | 1646 | AVIGRSGGIKYYA | 1736 | CATRRPFNSYNTEQSYDSW | 1989 |
| 001S-G11 | LRP6e1e2 | SIFRLGTMY | 1655 | ASIGKSGSTNYA | 1719 | CKQHPNGYR | 2005 |
| 001S-H11 | LRP6e1e2 | RTLSSFAMG | 1652 | ATISRSGGNTYYA | 1732 | CNLREWNNSGAGYW | 2026 |
| 001S-Al2 | LRP6e1e2 | IAFRYYDMG | 1608 | AAITWNGRSSDYA | 1704 | CAAVFTGRFYGRPPREKYDYW | 1838 |
| 001S-B12 | LRP6e1e2 | RLLSYYALA | 1622 | AAISRNGDKSHYS | 1694 | CTLVNEIKTWW | 2038 |
| 001S-C12 | LRP6e1e2 | RTFSNYAVG | 1641 | AAISRFGGSTYYV | 1693 | CAADRIENYLGRYYDPSEYEYW | 1824 |
| 001S-D12 | LRP6e1e2 | RTFSRYAMG | 1643 | GAISRSGNNTYYA | 1744 | CTLVNEIKTWW | 2041 |
| 001S-F12 | LRP6e1e2 | RTFRSYTMG | 1637 | AAISGSGGSTTYA | 1690 | CNADIKTTTYSPLRNYW | 2009 |
| 008S-B01 | LRP5 | TIFSINTMG | 1664 | ATMTSGGNTNYA | 1734 | CYRRQWASSWGARNYEYW | 2064 |
| 008S-001 | LRP5 | NINSIETLG | 1617 | ANMRGGGYMKYA | 1716 | CHGRDYGSNAPQYW | 2001 |
| 008S-D01 | LRP5 | NINSIETLG | 1617 | ANMRGGGYMKYA | 1716 | CYVKLRDDDYVYR | 2065 |
| 008S-E01 | LRP5 | NINSIETLG | 1617 | ANMRGGGYMKYA | 1716 | CNAVTYNGYTIR | 2023 |
| 008S-G01 | LRP5 | NINSIETLG | 1617 | ANMRGGGYMKYA | 1716 | CYARTQRMGVVNSYW | 2060 |
| 008S-A02 | LRP5 | NINSIETLG | 1617 | ANMRGGGYMKYA | 1716 | CNAVTFGGNTIR | 2021 |
| 008S-C02 | LRP5 | NINSIETLG | 1617 | ANMRGGGYMKYA | 1716 | CNAVTYDGY | 2022 |
| 008S-D02 | LRP5 | NINSIETLG | 1617 | ANMRGGGYMKYA | 1716 | CAAQFRNDYGLRYQSTNNYW | 1832 |
| 008S-E02 | LRP5 | NINSIETLG | 1617 | ANMRGGGYMKYA | 1716 | CNANYRGNRYW | 2019 |
| 009S-C01 | LRP6e3e4 | GSFSGYYWT | 1595 | GEINHSGATNYN | 1745 | CVRYAWPEFDHW | 2053 |
| 009S-B02 | LRP6e3e4 | GSLSGYYWS | 1596 | GEINHSGSTNYN | 1746 | CVRYAWPEFDHW | 2055 |
| 009S-CO2 | LRP6e3e4 | GSFSDYYWS | 1594 | GEINHSGSTNYN | 1746 | CVRYAWPEFDHW | 2054 |
| 009S-D02 | LRP6e3e4 | GTFSSYAIS | 1603 | GGIIPIFGTANYA | 1749 | CVYGRDFDYW | 2056 |
| 010S-A02 | LRP6e1e2 | HTFSSYAMG | 1607 | AAISQSGYVRYYA | 1691 | CKIYGLNGQPLGSW | 2003 |
| 010S-B02 | LRP6e1e2 | RTFNSGTMG | 1634 | AAITWRGGITYYA | 1705 | CNADGYSWDGRSGRRLELW | 2008 |
| 010S-D02 | LRP6e1e2 | RTFSSYAVG | 1647 | AAISYSGGSTKYA | 1702 | CAASVYISRRDSDYGYW | 1837 |
| 010S-E02 | LRP6e1e2 | LSSGRPFSSYVM | 1612 | AAISWSGGSTKYA | 1701 | CKLQVRPIGYSSAYSRNYW | 2004 |
| | | G | | | | | |
| 010S-F02 | LRP6e1e2 | RSFNSYVIG | 1625 | AAIRWSGDNTYYA | 1688 | CAASMEAMNSLRVNKERYYQ | 1835 |
| | | | | | | SW | |
| 009S-E02 | LRP6e1e2 | RRFTTYGMG | 1623 | AAVTWRSGSTYYA | 1708 | CAAGSTVVAEFNYW | 1829 |
| 009S-F02 | LRP6e1e2 | RTFSYYAMG | 1649 | AAISRSGGIYYA | 1698 | CNTVRPLWAW | 2029 |
| 009S-G02 | LRP6e1e2 | SIFSIYAMG | 1658 | AVITSGGKTVYA | 1740 | CYADSRSSWYDEYLEHW | 2058 |
| 009S-H02 | LRP6e1e2 | SIVRSLPMA | 1660 | ATINDAQRYYA | 1727 | CNTSPYMHDVW | 2027 |
| 009S-A03 | LRP6e1e2 | RTFSVYGVG | 1648 | AAVSASGGYTWYA | 1707 | CKAAPRWGGATAYW | 2002 |
| 010S-G02 | LRP6e1e2 | SIVRSLPMA | 1660 | ATINDAQRYYA | 1727 | CNTSPYMHDVW | 2028 |
| 010S-A03 | LRP6e1e2 | RTFRRYAMG | 1636 | ATISASGGNTAYA | 1731 | CNAPAWLYDDDYW | 2020 |
| 009S-B03 | LRP6e1e2 | RTFSNYAVG | 1641 | AAISRFGGSTYYV | 1693 | CAADRIENYLGRYYDPSEYEYW | 1825 |
| 010S-B03 | LRP6e1e2 | RTFSNYAVG | 1641 | AAISRFGGSTYYA | 1692 | CHAKQLRNGQMYTYW | 1999 |
| 010S-D03 | LRP6e1e2 | ISSVYGMG | 1609 | AAIQWSADNTFYA | 1686 | CAARTSGGLFHYRRSDHWDT | 1833 |
| | | | | | | W | |
| 009S-C03 | LRP6e1e2 | LPFSRYAMA | 1610 | AGMSGEGRNTKYR | 1713 | CSSRGYW | 2034 |
| 009S-D03 | LRP6e1e2 | SIFSDGAMG | 1656 | AVISGGRTGYA | 1737 | CNTYPFPIYKKGYPFW | 2030 |
| 009S-E03 | LRP6e1e2 | RRFTTYGMG | 1623 | AAVTWRSGSTYYA | 1708 | CAAGSTVVAEFNYW | 1830 |
| 009S-F03 | LRP6e1e2 | RTFSSYAMS | 1646 | AVIGRSGGIKYYA | 1736 | CATRRPFNSYNTEQSYDSW | 1990 |
| 010S-E03 | LRP6e1e2 | RSVSIYPMG | 1628 | AAINWSGDSTKYA | 1685 | CNAVVVGLSRRIDNIW | 2024 |
| 010S-F03 | LRP6e1e2 | RTFSRYVMG | 1644 | AAITWRGGSTYYA | 1706 | CATGPNSIY | 1988 |
| 009S-G03 | LRP6e1e2 | RSVSSYNMG | 1629 | AAISRRGGIIEYG | 1695 | CHAVENILGRFVDYW | 2000 |
| 009S-H03 | LRP6e1e2 | SIFSINTMG | 1657 | AVITSGGKTVYA | 1740 | CYADSRSSWYDEYLEHW | 2057 |
| 009S-A04 | LRP6e1e2 | RTLSAYDMG | 1650 | GGIRWSGGTTLYP | 1753 | CYARTVIGGFGAFRAHW | 2063 |
| 009S-B04 | LRP6e3e4 | SIFMINTMA | 1654 | ATIRPVVSETTYA | 1728 | CNAKRPWGTRDEYW | 2018 |
| 010S-G03 | LRP6e3e4 | RSFNSYTTT | 1624 | AAIRGSSGSTFYA | 1687 | CNAASTVTAWPYYGPDYW | 2006 |
| 009S-C04 | LRP6e3e4 | FRFSISTMG | 1553 | AYITGGGRTMDG | 1743 | CNAFVRSDFDRYYDYW | 2011 |
| 009S-D04 | LRP6e3e4 | TIVSIYRIN | 1665 | AGITSSGRTIYA | 1712 | CNAASTVTAWPYYGPDYW | 2007 |
| 010S-H03 | LRP6e3e4 | RIFSIYDMG | 1621 | SGIRWSGGTSYA | 1789 | CSSRGYW | 2035 |
| 009S-E04 | LRP6e3e4 | RIFAIYDIA | 1618 | AMIRPVVTEIDYA | 1715 | CNAKRPWGSRDEYW | 2012 |
| 010S-A04 | LRP6e3e4 | SLFSFNAVG | 1662 | ASISSGGRTNYA | 1722 | CSKGGVYGGTYVPDSW | 2032 |
| 009S-F04 | LRP6e3e4 | RSLSSFAMG | 1627 | ARISRGDGYTDEA | 1718 | CAAVQAVIGGTLTTAYDYW | 1839 |
| 010S-B04 | LRP6e3e4 | RVLSYYAMA | 1653 | AGITRGGATTYYS | 1711 | CAAGPNWSTRNREYDYW | 1827 |
| 009S-G04 | LRP6e3e4 | GTFSRYHMG | 1601 | SAITWSGGRTYYA | 1788 | CALTWAPTPTNRRSDYAYW | 1872 |
| 009S-H04 | LRP6e3e4 | RIFAIYDMA | 1619 | ATIRPVVSETTYA | 1728 | CNAKRPWGTRDEYW | 2017 |
| 010S-C04 | LRP6e3e4 | SLFSFNAMG | 1661 | ASISSGSRTNYA | 1723 | CSKGGVYGGTYVPDSW | 2033 |
| 010S-D04 | LRP6e3e4 | RIFAIYDIA | 1618 | ATIRPVVTQIDYA | 1730 | CNAKRPWGSRDEYW | 2015 |
| 010S-E04 | LRP6e3e4 | RTFGSDVMG | 1631 | ALTGWGDGSTTYYE | 1714 | CAAARRSGTYDIGQYLRESAYV | 1820 |
| | | | | | | FW | |
| 010S-F04 | LRP6e3e4 | RTFSRYAMG | 1643 | AAITRSGSNTYYA | 1703 | CAADPRGVTLPRATAYEYW | 1823 |
| 009S-A05 | LRP6e3e4 | RTFSDYSMG | 1639 | AGISWIADNRYYA | 1710 | CTAGRSRYLYGSSLNGPYDYW | 2036 |
| 010S-G04 | LRP6e3e4 | VIFALYDIA | 1666 | ATIRPVVTETDYA | 1729 | CNAKRPWGSRDEYW | 2014 |
| 010S-H04 | LRP6e3e4 | RSFSDFFMG | 1626 | ATISWSGSSANYE | 1733 | CAAAYSYSQYGSSYSYW | 1821 |
| 010S-A05 | LRP6e3e4 | LSFSSYAMG | 1611 | AAISRSGVSTYYA | 1699 | CAAKFGVLATTESRHDYW | 1831 |
| 010S-C05 | LRP6e3e4 | RTFNIDDMG | 1633 | ASIRWSGQSPYYA | 1720 | CNAETYSGNTIW | 2010 |
| 010S-D05 | LRP6e3e4 | RTFSDYSMA | 1638 | AGISWIADNRYYA | 1710 | CAGDRSRYLYGDSLRGPYGYW | 1841 |
| 010S-E05 | LRP6e3e4 | SVFTTFAKG | 1663 | ASITASSDRTFYA | 1725 | CAAYSTFNTDVASMKPDYW | 1840 |
| 010S-F05 | LRP6e3e4 | RIFSIYDIA | 1620 | ATIRPVVTETDYA | 1729 | CNAKRPWGSRDEYW | 2013 |
| 013S-G04 | LRP6e3e4 | RIFAIYDIA | 1618 | ATIRPVVSETTYA | 1728 | CNAKRPWGTRDEYW | 2016 |
| 013S-H04 | LRP6e3e4 | RTFSMYDMG | 1640 | ASIRWSSGNTWYA | 1721 | CYANIYYTRRAPEEYW | 2059 |
| 013S-A05 | LRP6e3e4 | RTFNTYAMG | 1635 | ASVSWRYDRTYYT | 1726 | CAADTNWRAGPRVGIDEYAY | 1826 |
| | | | | | | W | |
| 013S-B05 | LRP6e3e4 | FAFSTTAMS | 1549 | STINPGGLSKSYA | 1806 | CTKGGIQ | 2037 |
| 013S-C05 | LRP6e3e4 | NIFPIDDMS | 1616 | ATVTSGGRINYA | 1735 | CNVDRTLYGKYKEYW | 2031 |
| 013S-D05 | LRP6e3e4 | RIFSIYDMG | 1621 | SGIRWSGGTSYA | 1789 | CGSRGYW | 1998 |
| 013S-E05 | LRP6e3e4 | YTFTYRYLH | 1681 | GGIIPIFGTADYA | 1748 | CARDWELYGMDVW | 1907 |
| 013S-F05 | LRP6e3e4 | GTFSSYAIS | 1603 | GIINPSGGSTSYA | 1761 | CARAGYYDSSGYYAFDIW | 1882 |
| 013S-G05 | LRP6e3e4 | YTFTYRYLH | 1681 | GGVIPIFGTADYA | 1755 | CASDIVVDDAFDTW | 1969 |
| 010S-G06 | LRP6e3e4 | FSFETYGMS | 1555 | SGISGSGGRTHYA | 1792 | CARDLDYW | 1897 |
| 009S-B05 | LRP6e3e4 | FTFDAYAMH | 1560 | STLSGDANNAYYA | 1811 | CARGGSGWSNYYGMDVW | 1931 |
| 009S-C05 | LRP6e3e4 | YTFTYRYLH | 1681 | GRIIPVLKITNYA | 1768 | CAVVDDAFDIW | 1996 |
| 009S-D05 | LRP6e3e4 | FTLRNHWLS | 1591 | SAISGSGGSTYYA | 1786 | CATRTGYSYGFNFWAFDIW | 1991 |
| 009S-E05 | LRP6e3e4 | YTFTNNFMH | 1676 | GHVDPGDGETIYA | 1756 | CARDWGIAAAGDYYYYGMDV | 1908 |
| | | | | | | W | |
| 009S-F05 | LRP6e3e4 | FTFDDYMS | 1561 | SAIGTGGGTYYA | 1781 | CARLGSYGSPYYYYGMDVW | 1959 |
| 009S-G05 | LRP6e3e4 | FTFSDYYMS | 1568 | SGVSWNGSRTHYA | 1799 | CAKDSGLV | 1852 |
| 009S-C06 | LRP6e3e4 | YTFASYDIH | 1671 | GWMNPNSGNTGY | 1776 | CARATGSGWYTDLGYW | 1883 |
| | | | | A | | | |
| 009S-D06 | LRP6e3e4 | FTFSSHSTH | 1573 | STISDTNSGTYYA | 1807 | CAKAQATGWSGYYTFDYW | 1843 |
| 009S-E06 | LRP6e3e4 | FTFTDYGLH | 1587 | AVISYGGSNKYYA | 1739 | CASGYSYGLYYYGMDVW | 1973 |
| 009S-F06 | LRP6e3e4 | YTFTYRYLH | 1681 | GGIIPIFGTANYA | 1749 | CATEAALDAFDIW | 1985 |
| 009S-G06 | LRP6e3e4 | YIFTDYYMH | 1669 | GWINPNSGGTNYA | 1774 | CARDFLGSTGDYW | 1892 |
| 009S-H06 | LRP6e3e4 | FTFSSSAMH | 1574 | SAIGTGGSTYYA | 1783 | CAKGGDYFYYYYGMDVW | 1856 |
| 009S-A07 | LRP6e3e4 | YTFTYRYLH | 1681 | GGIIPIFGTANYA | 1749 | CATAYGSSSLNIDYW | 1980 |
| 009S-B07 | LRP6e3e4 | YTFTGYYMH | 1675 | GWINPNSGGTNYA | 1774 | CVKDGGSFPLAYAFDIW | 2049 |
| 009S-D07 | LRP6e3e4 | FPFRYYGMS | 1551 | ARIGWNGGSIVYA | 1717 | CARDYSDRSGIDYW | 1910 |
| 009S-F07 | LRP6e3e4 | GTFSSYAIS | 1603 | GIINPSGGSTSYA | 1761 | CARAAGNFWSGYYTFDYW | 1876 |
| 009S-G07 | LRP6e3e4 | YTFTYRYLH | 1681 | GGIIPIFGTANYA | 1749 | CARGSYGMDVW | 1947 |
| 009S-H07 | LRP6e3e4 | YTFTGYYMH | 1675 | GWMNPNSGNTGY | 1776 | CASSVVPAGPAGVYAFDIW | 1975 |
| | | | | A | | | |
| 009S-A08 | LRP6e3e4 | GTFSSHAIN | 1602 | GWISANNGNTDYA | 1775 | CARDQDYGDYGWYYYGMDV | 1902 |
| | | | | | | W | |
| 011S-C01 | LRP6e3e4 | LTFTSHGMS | 1615 | SYVSDSGSSVYYA | 1818 | CARHPGSFGGYSYAWYYYYG | 1956 |
| | | | | | | MDVW | |
| 009S-C08 | LRP6e3e4 | FSFNTFGIH | 1556 | AVISYDGSNKYYA | 1738 | CAKSIAAAGTGYYGMDVW | 1868 |
| 009S-D08 | LRP6e3e4 | YTFTSYDIN | 1679 | GGIIPIFGTANYA | 1749 | CARGPYYFDYW | 1939 |
| 011S-F01 | LRP6e3e4 | FSFSDYYMS | 1558 | SGISESGGRTYYA | 1790 | CASAADFDYW | 1966 |
| 009S-E08 | LRP6e3e4 | YGFTGYYIH | 1668 | GWMNPNSGNTGY | 1776 | CARGYGDYDLW | 1951 |
| | | | | A | | | |
| 009S-F08 | LRP6e3e4 | DTFANYGFS | 1547 | GXVNAGNGNTTYA | 1777 | CAKGWLDFDYW | 1866 |
| 009S-G08 | LRP6e3e4 | FTFSDFAMT | 1566 | SYISGDSGYTNYA | 1813 | CARLGSYPGPYYYYMDVW | 1961 |
| 009S-H08 | LRP6e3e4 | YTFTDYFMN | 1673 | GIINPSGDSTRFA | 1758 | CARDDGLGGMDVW | 1888 |
| 009S-A09 | LRP6e3e4 | YTFTYRYLH | 1681 | GRIIPILGSTNYA | 1767 | CTTDLWDYW | 2047 |
| 011S-F02 | LRP6e3e4 | FTFSTYGMH | 1584 | SSISVSSGTTHYA | 1804 | CARGGSGSYYYAFDIW | 1929 |
| 011S-G02 | LRP6e3e4 | YTFTSYAMN | 1678 | GGIIPIFGTANYA | 1749 | CARDASGGSTGWYYFDSW | 1886 |
| 011S-A03 | LRP6e3e4 | FTFSSYWMH | 1580 | STISGSGGRTYYA | 1808 | CATSPYGVFTLDYW | 1993 |
| 011S-CO3 | LRP6e3e4 | YTFSYRYLH | 1672 | GGIIPIFGTANYA | 1749 | CASTVTTDAFDIW | 1977 |
| 011S-D03 | LRP6e3e4 | FSFDDYGMS | 1554 | SVISSGGTIYYA | 1812 | CARHLSSGYLSYYGMDVW | 1954 |
| 011S-F03 | LRP6e3e4 | FTFSSYAMS | 1577 | SAISGSGGSTYYA | 1786 | CAKGGRDGYKGYFDYW | 1859 |
| 011S-004 | LRP6e1e2 | GTFNSNAIS | 1598 | GWMNPNSGNTGY | 1776 | CARDYYGSGSYNYGMDVW | 1912 |
| | | | | A | | | |
| 011S-D04 | LRP6e1e2 | YTFTSYDIN | 1679 | GIINPSGGSTSYA | 1761 | CAREAYYYYYGMDVW | 1915 |
| 011S-H04 | LRP6e1e2 | YIFTDYYMH | 1669 | GRIIPILGRANYA | 1765 | CARGGYSTLDYW | 1932 |
| 008S-F02 | LRP5 | YTFTNYCMH | 1677 | GIINPSDGSTSHA | 1757 | CAKDMVHLIVALAIDYW | 1851 |
| 010S-C06 | LRP6e1e2 | FTFNSYSMD | 1563 | SSISPRGGSTYYA | 1802 | CAPYYYDKSAKPLRSYFDHW | 1875 |
| 010S-E06 | LRP6e3e4 | LTVSSNYMS | 1615 | SGISWNSGSIGYA | 1796 | CARGSDCSGGSCYYSFDYW | 1944 |
| 010S-F06 | LRP6e3e4 | FTFSSSWMH | 1575 | SAIGTGGGTYYA | 1781 | CAREVAVKDYYYYYMDVW | 1921 |
| 010S-H06 | LRP6e3e4 | YTFTSYDIN | 1679 | GRIIPILGRTNYA | 1766 | CAREERGATGRAFDIW | 1918 |
| 010S-A07 | LRP6e3e4 | FTFSSYAMH | 1576 | ASISSTSGSKYYA | 1724 | CAKTYYDFWSGYYTFDYW | 1870 |
| 010S-B07 | LRP6e3e4 | FTFSDYYMS | 1568 | SMISYNGGRAFYA | 1800 | CARGNPYYFDYW | 1937 |
| 010S-C07 | LRP6e3e4 | FTFSKTDMH | 1569 | STITTDSRGTYYA | 1810 | CAKGGDYYYYYYGMDVW | 1858 |
| 010S-D07 | LRP6e3e4 | YTFTYRYLH | 1681 | GGIIPIFGTANYA | 1749 | CANGLEDAYAFDIW | 1873 |
| 009S-D05 | LRP6e3e4 | FTLRNHWLS | 1591 | SAISGSGGSTYYA | 1786 | CATRTGYSYGFNFWAFDIW | 1992 |
| 009S-E05 | LRP6e3e4 | YTFTNNFMH | 1676 | GHVDPGDGETIYA | 1756 | CARDWGIAAAGDYYYYGMDV | 1909 |
| | | | | | | W | |
| 010S-E07 | LRP6e3e4 | YTFTYRYLH | 1681 | GGIIPIFGTANYA | 1749 | CAKDDFSLYGMDVW | 1845 |
| 009S-F05 | LRP6e3e4 | FTFDDYGMS | 1561 | SAIGTGGGTYYA | 1781 | CARLGSYGSPYYYYGMDVW | 1960 |
| 010S-F07 | LRP6e3e4 | YTFTYRYLH | 1681 | GGIIPIFGTANYA | 1749 | CARLDYGETEGNGDW | 1958 |
| 010S-G07 | LRP6e3e4 | FTFSSYAMH | 1576 | STISGSGGSTYYA | 1809 | CARAGYGRYYYGMDVW | 1880 |
| 009S-G05 | LRP6e3e4 | FTFSDYYMS | 1568 | SGVSWNGSRTHYA | 1799 | CAKDSGLV | 1853 |
| 010S-H07 | LRP6e3e4 | YTFTYRYLH | 1681 | GGIIPIFGTANYA | 1749 | CARDDSMGAFDIW | 1890 |
| 010S-A08 | LRP6e3e4 | HTFLTYDIN | 1606 | GRITPRLGIANYA | 1770 | CASYFGVMDVW | 1979 |
| 009S-A07 | LRP6e3e4 | YTFTYRYLH | 1681 | GGIIPIFGTANYA | 1749 | CATAYGSSSLNIDYW | 1981 |
| 009S-B07 | LRP6e3e4 | YTFTGYYMH | 1675 | GWINPNSGGTNYA | 1774 | CVKDGGSFPLAYAFDIW | 2050 |
| 009S-B06 | LRP6e3e4 | YTFTYRYLH | 1681 | GGIIPIFGTANYA | 1749 | CAPALTDAGSFDYW | 1874 |
| 010S-B08 | LRP6e3e4 | YTFTYRYLH | 1681 | GGIIPVFGTADYA | 1751 | CARDREQQILDYW | 1904 |
| 010S-C08 | LRP6e3e4 | FTFSTFGMH | 1582 | STITSSGGSTYYA | 1809 | CARAGIAAAPGSRNYYGMDV | 1878 |
| | | | | | | W | |
| 009S-C06 | LRP6e3e4 | YTFASYDIH | 1671 | GWMNPNSGNTGY | 1776 | CARATGSGWYTDLGYW | 1884 |
| | | | | A | | | |
| 009S-D06 | LRP6e3e4 | FTFSSHSTH | 1573 | STISDTNSGTYYA | 1807 | CAKAQATGWSGYYTFDYW | 1844 |
| 010S-D08 | LRP6e3e4 | FTFSSSWMH | 1575 | SAIGTGGGTYYA | 1781 | CAKEDYDSSGYYYYYFQHW | 1855 |
| 009S-E06 | LRP6e3e4 | FTFTDYGLH | 1587 | AVISYGGSNKYYA | 1739 | CASGYSYGLYYYGMDVW | 1974 |
| 010S-E08 | LRP6e3e4 | YSFTRTDMH | 1670 | GYISAYTGHTSYA | 1778 | CARDLGGTADYW | 1898 |
| 010S-F08 | LRP6e3e4 | LTFDDHAMH | 1613 | SYISSSGRTIFYA | 1815 | CVRGDSGWGILYYVMDVW | 2052 |
| 009S-F06 | LRP6e3e4 | YTFTYRYLH | 1681 | GGIIPIFGTANYA | 1749 | CATEAALDAFDIW | 1986 |
| 010S-G08 | LRP6e3e4 | YIFTDYYMH | 1669 | GGFDPEDGETIYA | 1747 | CARGGGPNEHDYYFDYW | 1927 |
| 010S-H08 | LRP6e3e4 | FTFZNAWMS | 1590 | SGISGSGGSTYYA | 1793 | CARGRGKKNYYYGMDVW | 1942 |
| 010S-A09 | LRP6e3e4 | FTFSTYYMS | 1586 | SGISWNGGKTHYV | 1794 | CARGGDFDYW | 1925 |
| 010S-B09 | LRP6e3e4 | GTFSSYAIS | 1603 | GWINPNSGDTNYA | 1773 | CARGEQWLVWGFDPW | 1924 |
| 009S-G06 | LRP6e3e4 | YIFTDYYMH | 1669 | GWINPNSGGTNYA | 1774 | CARDFLGSTGDYW | 1893 |
| 010S-C09 | LRP6e3e4 | YTFTYRYLH | 1681 | GGIIPIFGTANYA | 1749 | CARDEVEGGMDVW | 1891 |
| 009S-H06 | LRP6e3e4 | FTFSSSAMH | 1574 | SAIGTGGSTYYA | 1783 | CAKGGDYFYYYYGMDVW | 1857 |
| 010S-D09 | LRP6e3e4 | GTFSSYTIS | 1603 | GGIVPAYRRANYA | 1754 | CAKGGYELDYW | 1865 |
| 010S-E09 | LRP6e3e4 | GDLSIYTIN | 1593 | GWINAGNGNTTYA | 1772 | CARGGDSSGYYYYAFDIW | 1926 |
| 009S-A07 | LRP6e3e4 | YTFTYRYLH | 1681 | GGIIPIFGTANYA | 1749 | CATAYGSSSLNIDYW | 1982 |
| 009S-B07 | LRP6e3e4 | YTFTGYYMH | 1675 | GWINPNSGGTNYA | 1774 | CVKDGGSFPLAYAFDIW | 2051 |
| 009S-D08 | LRP6e3e4 | YTFTSYDIN | 1679 | GGIIPIFGTANYA | 1749 | CARGPYYFDYW | 1940 |
| 010S-F09 | LRP6e3e4 | FTFDEYAMH | 1562 | STISGSGGSTYYA | 1809 | CASAKNDFWSGYFAFDYW | 1968 |
| 010S-G09 | LRP6e3e4 | GTFNTHTIT | 1599 | GWMNPNSGNTGY | 1776 | CARGNLDFDYW | 1936 |
| | | | | A | | | |
| 010S-H09 | LRP6e3e4 | FTFSDHYMS | 1567 | SAISSGSDRTYYA | 1787 | CARYSGYDFDYW | 1965 |
| 010S-A10 | LRP6e3e4 | FSFSSYSMN | 1559 | SYISSSSSTIYYA | 1816 | CARGSGYYGPGYYGMDVW | 1946 |
| 009S-D07 | LRP6e3e4 | FPFRYYGMS | 1551 | ARIGWNGGSIVYA | 1717 | CARDYSDRSGIDYW | 1911 |
| 010S-B10 | LRP6e3e4 | FAFKDYYMT | 1548 | SAIGAGGGTYYA | 1779 | CARESALYSSSWYYYYYGMDV | 1920 |
| | | | | | | W | |
| 010S-C10 | LRP6e3e4 | FTFSSYAMS | 1577 | SAISGSGGSTYYA | 1786 | CAKGGRDGYKGYFDYW | 1860 |
| 009S-E07 | LRP6e3e4 | YTFTGYYIH | 1674 | ZHVDPEDGETIYA | 1819 | CARGPAAIGILGWFDPW | 1938 |
| 010S-D10 | LRP6e3e4 | YIFTDYYMH | 1669 | GWMNPNSGNTGY | 1776 | CARTLSGYSSSWYVFDYW | 1964 |
| | | | | A | | | |
| 010S-E10 | LRP6e3e4 | FTFSSYSMN | 1579 | SGISWNSGTTGYS | 1797 | CARDHSSGWRHYFDYW | 1895 |
| 010S-F10 | LRP6e3e4 | FTFSNSDMN | 1570 | SYISGNSGYTNYA | 1814 | CASGSYYSDFDYW | 1971 |
| 010S-G10 | LRP6e3e4 | GTFSSYAIS | 1603 | GRINPNGGGTIYA | 1769 | CAREGGYYFDYW | 1919 |
| 009S-F07 | LRP6e3e4 | GTFSSYAIS | 1603 | GIINPSGGSTSYA | 1761 | CARAAGNFWSGYYTFDYW | 1877 |
| 009S-G07 | LRP6e3e4 | YTFTYRYLH | 1681 | GGIIPIFGTANYA | 1749 | CARGSYGMDVW | 1948 |
| 010S-H10 | LRP6e3e4 | YTFTSYYMH | 1680 | GWINPNSGGTNYA | 1774 | CAREAAEIPVGAFDIW | 1914 |
| 010S-All | LRP6e3e4 | FTFSNSDMN | 1570 | SYISGNSGYTNYA | 1814 | CASGSYYSDFDYW | 1972 |
| 010S-B11 | LRP6e3e4 | FTFRNYAIH | 1564 | SAIGTGGDTYYA | 1780 | CARDGGIRDFDYW | 1894 |
| 010S-C11 | LRP6e3e4 | YTFTYRYLH | 1681 | GGIIPIFGTANYA | 1749 | CAADDLGLELHYW | 1822 |
| 009S-H07 | LRP6e3e4 | YTFTGYYMH | 1675 | GWMNPNSGNTGY | 1776 | CASSVVPAGPAGVYAFDIW | 1976 |
| | | | | A | | | |
| 009S-A08 | LRP6e3e4 | GTFSSHAIN | 1602 | GWISANNGNTDYA | 1775 | CARDQDYGDYGWYYYGMDV | 1903 |
| | | | | | | W | |
| 010S-D11 | LRP6e3e4 | YTFTYRYLH | 1681 | GGIIPVFGTANYA | 1752 | CATDEYSSSYAFDIW | 1983 |
| 010S-E11 | LRP6e3e4 | FTFSAHGMH | 1565 | SGISESGGSTYYA | 1791 | CARGRGYSYGYYAFDIW | 1943 |
| 010S-F11 | LRP6e3e4 | YTFTYRYLH | 1681 | GGIIPIFGTANYA | 1749 | CARDSDWGVVDPW | 1905 |
| 010S-G11 | LRP6e3e4 | YTFTYRYLH | 1681 | GRIIPVLKITNYA | 1768 | CAVVDDAFDIW | 1997 |
| 010S-H11 | LRP6e3e4 | YTFTYRYLH | 1681 | GGIIPIFGTANYA | 1749 | CAKDGTDGRFDPW | 1846 |
| 009S-B08 | LRP6e3e4 | FTFTSSAVQ | 1589 | GWINAGNGNTTYA | 1772 | CARRGGDVTVPAAYYAMDVW | 1963 |
| 010S-Al2 | LRP6e3e4 | VTFSRYPIS | 1667 | GGIIPIFGTANYA | 1749 | CAKDSGNYGYYGMDVW | 1854 |
| 010S-B12 | LRP6e3e4 | FTFSSYDMH | 1578 | SGITSNGGATYYA | 1798 | CARGTTGKGYYYYGMDVW | 1949 |
| 010S-C12 | LRP6e3e4 | FTFSNYWIH | 1571 | SAIGTGGGTYYA | 1781 | CTTAGYKAARRSVYPRIFNFDY | 2044 |
| | | | | | | W | |
| 010S-D12 | LRP6e3e4 | YTFTYRYLH | 1681 | GRIIPIFGTANYA | 1763 | CAREEGVGGMDVW | 1917 |
| 010S-E12 | LRP6e3e4 | FTFSSYAMH | 1576 | SAIGAGGGTYYA | 1779 | CARGVSSGYYYYYGMDVW | 1950 |
| 010S-F12 | LRP6e3e4 | FTVSSNYMS | 1592 | SAIGTGGGTYYA | 1781 | CARAGTNWGGWYFDLW | 1879 |
| 010S-G12 | LRP6e3e4 | FALSGYYMS | 1550 | SSISSSSTYIRYA | 1803 | CATVTGYSSAGAFDIW | 1995 |
| 011S-A01 | LRP6e3e4 | FTFSTHAFH | 1583 | SAIRGSGERTYYA | 1784 | CARDLRNWGSPYWYFDLW | 1901 |
| 011S-B01 | LRP6e3e4 | GTFSHYTIS | 1600 | GWINAGNGNTKYS | 1771 | CAKGGSLDMDVW | 1864 |
| 011S-C01 | LRP6e3e4 | LTFTSHGMS | 1615 | SYVSDSGSSVYYA | 1818 | CARHPGSFGGYSYAWYYYYG | 1957 |
| | | | | | | MDVW | |
| 011S-D01 | LRP6e3e4 | GTISDYTVS | 1605 | GIINPSGGSTSYA | 1761 | CARGYYDFDYW | 1953 |
| 009S-C08 | LRP6e3e4 | FSFNTFGIH | 1556 | AVISYDGSNKYYA | 1738 | CAKSIAAAGTGYYGMDVW | 1869 |
| 011S-E01 | LRP6e3e4 | FPFZYYSMN | 1552 | SAISGRDGRTYYA | 1785 | CAKDLGIQLPDYYFDYW | 1847 |
| 009S-D08 | LRP6e3e4 | YTFTSYDIN | 1679 | GGIIPIFGTANYA | 1749 | CARGPYYFDYW | 1941 |
| 011S-F01 | LRP6e3e4 | FSFSDYYMS | 1558 | SGISESGGRTYYA | 1790 | CASAADFDYW | 1967 |
| 009S-E08 | LRP6e3e4 | YGFTGYYIH | 1668 | GWMNPNSGNTGY | 1776 | CARGYGDYDLW | 1952 |
| | | | | A | | | |
| 009S-F08 | LRP6e3e4 | DTFANYGFS | 1547 | GXVNAGNGNTTYA | 1777 | CAKGWLDFDYW | 1867 |
| 011S-G01 | LRP6e3e4 | YTFTYRYLH | 1681 | GGIIPLFGTANYA | 1750 | CTTDDYGDQYGMDVW | 2046 |
| 011S-H01 | LRP6e3e4 | YTFTYRYLH | 1681 | GGIIPIFGTANYA | 1749 | CTTDDYGDLTHLDYW | 2045 |
| 011S-A02 | LRP6e3e4 | GTFSSYAIS | 1603 | GWMNPNSGNTGY | 1776 | CARDKGYAFDIW | 1896 |
| | | | | A | | | |
| 011S-B02 | LRP6e3e4 | YSFTRTDMH | 1670 | GYISAYTGHTSYA | 1778 | CARDLGGTADYW | 1899 |
| 011S-CO2 | LRP6e3e4 | FTFSTYSMN | 1585 | SGISWNSGRIGYA | 1795 | CARDVGAFDIW | 1906 |
| 009S-G08 | LRP6e3e4 | FTFSDFAMT | 1566 | SYISGDSGYTNYA | 1813 | CARLGSYPGPYYYYMDVW | 1962 |
| 011S-D02 | LRP6e3e4 | FTFSSYAMS | 1577 | SSISGSGGVTYYA | 1801 | CARGGNTYYYYYGMDVW | 1928 |
| 009S-H08 | LRP6e3e4 | YTFTDYFMN | 1673 | GIINPSGDSTRFA | 1758 | CARDDGLGGMDVW | 1889 |
| 011S-E02 | LRP6e3e4 | YTFTYRYLH | 1681 | GGIIPIFGTANYA | 1749 | CATDYGDYYYGMDVW | 1984 |
| 009S-A09 | LRP6e3e4 | YTFTYRYLH | 1681 | GRIIPILGSTNYA | 1767 | CTTDLWDYW | 2048 |
| 011S-F02 | LRP6e3e4 | FTFSTYGMH | 1584 | SSISVSSGTTHYA | 1805 | CARGGSGSYYYAFDIW | 1930 |
| 011S-G02 | LRP6e3e4 | YTFTSYAMN | 1678 | GGIIPIFGTANYA | 1749 | CARDASGGSTGWYYFDSW | 1887 |
| 011S-H02 | LRP6e3e4 | YTFTNNFMH | 1676 | GIINPSGGSTSYA | 1761 | CARGLYKRYSYGYGMDVW | 1935 |
| 009S-B09 | LRP6e3e4 | FSFNTYAMN | 1557 | AVTSYDGGKKNYA | 1742 | CARDAGGDYDYW | 1885 |
| 009S-C09 | LRP6e3e4 | GTFHTYGLS | 1597 | GGIIPIFGTANYA | 1749 | CARGSGWSGLDYW | 1945 |
| 011S-A03 | LRP6e3e4 | FTFSSYWMH | 1580 | STISGSGGRTYYA | 1808 | CATSPYGVFTLDYW | 1994 |
| 011S-B03 | LRP6e3e4 | GTFSZYAIS | 1604 | GIINPSGGSTNYA | 1760 | CARAGYWSGYGYYGMDVW | 1881 |
| 011S-CO3 | LRP6e3e4 | YTFSYRYLH | 1672 | GGIIPIFGTANYA | 1749 | CASTVTTDAFDIW | 1978 |
| 011S-D03 | LRP6e3e4 | FSFDDYGMS | 1554 | SVISSGGTIYYA | 1812 | CARHLSSGYLSYYGMDVW | 1955 |
| 009S-F09 | LRP6e3e4 | YSFTRTDMH | 1670 | GYISAYTGHTSYA | 1778 | CARDLGGTADYW | 1900 |
| 011S-E03 | LRP6e3e4 | FTFSSYAMS | 1577 | SAISGSGGSTYYA | 1786 | CAKGGRDGYKGYFDYW | 1861 |
| 009S-G09 | LRP6e3e4 | FTFSRHSMN | 1572 | SYSSGNSGYTNYA | 1817 | CARGDLEFDYW | 1923 |
| 011S-F03 | LRP6e3e4 | FTFSSYAMS | 1577 | SAISGSGGSTYYA | 1786 | CAKGGRDGYKGYFDYW | 1862 |
| 009S-H09 | LRP6e3e4 | FTFSSYAMS | 1577 | SAISGSGGSTYYA | 1786 | CAKGGRDGYKGYFDYW | 1863 |
| 011S-G03 | LRP6e3e4 | YTFTYRYLH | 1681 | GRIIPIHGIANYA | 1764 | CAREYSYGYFRYW | 1922 |
| 009S-A10 | LRP6e3e4 | FTFTSSAMQ | 1588 | GIINPSGGSTIYA | 1759 | CASGDTYDLYSLDVW | 1970 |
| 009S-B10 | LRP6e3e4 | YIFTDYYMH | 1669 | GWINAGNGNTTYA | 1772 | CAKVASGWSWPFDIW | 1871 |
| 011S-B04 | LRP6e1e2 | YTFTSYDIN | 1679 | GIINPSGGSTSYA | 1761 | CTREHSYYYYGMDVW | 2042 |
| 011S-C04 | LRP6e1e2 | GTFNSNAIS | 1598 | GWMNPNSGNTGY | 1776 | CARDYYGSGSYNYGMDVW | 1913 |
| | | | | A | | | |
| 011S-D04 | LRP6e1e2 | YTFTSYDIN | 1679 | GIINPSGGSTSYA | 1761 | CAREAYYYYYGMDVW | 1916 |
| 011S-E04 | LRP6e1e2 | FTFSSZZMH | 1581 | SAIGTGGGTZYA | 1782 | CAKDLGRAAAGSMDVW | 1850 |
| 011S-F04 | LRP6e1e2 | YIFTDYYMH | 1669 | GRIIPILGRANYA | 1765 | CARGGYSTLDYW | 1933 |
| 011S-H04 | LRP6e1e2 | YIFTDYYMH | 1669 | GRIIPILGRANYA | 1765 | CARGGYSTLDYW | 1934 |
| 011S-A05 | LRP6e1e2 | FTFSSYAMH | 1576 | SAIGTGGGTYYA | 1781 | CAKDLGRAAAGSMDVW | 1848 |
| 011S-B05 | LRP6e1e2 | YZFTDYYMH | 1683 | GWMNPNSGNTGY | 1776 | CTRVAWGLDYW | 2043 |
| | | | | A | | | |
| 011S-C05 | LRP6e1e2 | FTFSSYAMH | 1576 | SAIGTGGGTYYA | 1781 | CAKDLGRAAAGSMDVW | 1849 |
| 1115.3 | LRP6e1e2 | GFSFSTS | 2208 | NLNGGS | 2211 | ELAGYGTPFAY | 2214 |
| 421.1 | LRP6e1e2 | GYTFTTY | 2209 | FPGNVNT | 2212 | EELQYYFDY | 2215 |
| YW211.31 | LRP6e3e4 | GFTFTSY | 2210 | SPYSGS | 2213 | RARPPIRLHPRGSVMDY | 2216 |
| .57 | | | | | | | |
| | Confirmed | | | | SID | | SID |
| Clone ID | Binding | CDRL1 | SID NO. | CDRL2 | NO. | CDRL3 | NO. |
| 001S-008 | LRP6e1e2 | RASQYISNYLN | 2098 | AASSLQS | 2110 | CQQSYITPLTF | 2160 |
| 0015-C10 | LRP6e1e2 | | | | | | |
| 001S-D10 | LRP6e1e2 | | | | | | |
| 001S-E10 | LRP6e1e2 | | | | | | |
| 001S-F10 | LRP6e1e2 | | | | | | |
| 0015-G10 | LRP6e1e2 | | | | | | |
| 001S-All | LRP6e1e2 | | | | | | |
| 001S-B11 | LRP6e1e2 | | | | | | |
| 001S-C11 | LRP6e1e2 | | | | | | |
| 001S-E11 | LRP6e1e2 | | | | | | |
| 001S-F11 | LRP6e1e2 | | | | | | |
| 001S-G11 | LRP6e1e2 | | | | | | |
| 001S-H11 | LRP6e1e2 | | | | | | |
| 001S-Al2 | LRP6e1e2 | | | | | | |
| 001S-B12 | LRP6e1e2 | | | | | | |
| 001S-C12 | LRP6e1e2 | | | | | | |
| 001S-D12 | LRP6e1e2 | | | | | | |
| 001S-F12 | LRP6e1e2 | | | | | | |
| 008S-B01 | LRP5 | | | | | | |
| 008S-C01 | LRP5 | | | | | | |
| 008S-D01 | LRP5 | | | | | | |
| 008S-E01 | LRP5 | | | | | | |
| 008S-G01 | LRP5 | | | | | | |
| 008S-A02 | LRP5 | | | | | | |
| 008S-CO2 | LRP5 | | | | | | |
| 008S-D02 | LRP5 | | | | | | |
| 008S-E02 | LRP5 | | | | | | |
| 009S-C01 | LRP6e3e4 | RASQRVSNYLN | 2089 | AASSLQG | 2110 | CQQSYSVPYTF | 2178 |
| 009S-B02 | LRP6e3e4 | RASQSISNYLN | 2090 | AASSLQS | 2110 | CQQSYSLPLTF | 2170 |
| 009S-CO2 | LRP6e3e4 | RASQSISNYLN | 2090 | AASSLQS | 2110 | CQQSYSMPLTF | 2171 |
| 009S-D02 | LRP6e3e4 | SGSSSNVGNNYV | 2105 | DNDKRPS | 2122 | CESWDSSLSSEVF | 2139 |
| | | S | | | | | |
| 010S-A02 | LRP6e1e2 | | | | | | |
| 010S-B02 | LRP6e1e2 | | | | | | |
| 010S-D02 | LRP6e1e2 | | | | | | |
| 010S-E02 | LRP6e1e2 | | | | | | |
| 010S-F02 | LRP6e1e2 | | | | | | |
| 009S-E02 | LRP6e1e2 | | | | | | |
| 009S-F02 | LRP6e1e2 | | | | | | |
| 009S-G02 | LRP6e1e2 | | | | | | |
| 009S-H02 | LRP6e1e2 | | | | | | |
| 009S-A03 | LRP6e1e2 | | | | | | |
| 010S-G02 | LRP6e1e2 | | | | | | |
| 010S-A03 | LRP6e1e2 | | | | | | |
| 009S-B03 | LRP6e1e2 | | | | | | |
| 010S-B03 | LRP6e1e2 | | | | | | |
| 010S-D03 | LRP6e1e2 | | | | | | |
| 009S-CO3 | LRP6e1e2 | | | | | | |
| 009S-D03 | LRP6e1e2 | | | | | | |
| 009S-E03 | LRP6e1e2 | | | | | | |
| 009S-F03 | LRP6e1e2 | | | | | | |
| 010S-E03 | LRP6e1e2 | | | | | | |
| 010S-F03 | LRP6e1e2 | | | | | | |
| 009S-G03 | LRP6e1e2 | | | | | | |
| 009S-H03 | LRP6e1e2 | | | | | | |
| 009S-A04 | LRP6e1e2 | | | | | | |
| 009S-B04 | LRP6e3e4 | | | | | | |
| 010S-G03 | LRP6e3e4 | | | | | | |
| 009S-C04 | LRP6e3e4 | | | | | | |
| 009S-D04 | LRP6e3e4 | | | | | | |
| 010S-H03 | LRP6e3e4 | | | | | | |
| 009S-E04 | LRP6e3e4 | | | | | | |
| 010S-A04 | LRP6e3e4 | | | | | | |
| 009S-F04 | LRP6e3e4 | | | | | | |
| 010S-B04 | LRP6e3e4 | | | | | | |
| 009S-G04 | LRP6e3e4 | | | | | | |
| 009S-H04 | LRP6e3e4 | | | | | | |
| 010S-C04 | LRP6e3e4 | | | | | | |
| 010S-D04 | LRP6e3e4 | | | | | | |
| 010S-E04 | LRP6e3e4 | | | | | | |
| 010S-F04 | LRP6e3e4 | | | | | | |
| 009S-A05 | LRP6e3e4 | | | | | | |
| 010S-G04 | LRP6e3e4 | | | | | | |
| 010S-H04 | LRP6e3e4 | | | | | | |
| 010S-A05 | LRP6e3e4 | | | | | | |
| 010S-C05 | LRP6e3e4 | | | | | | |
| 010S-D05 | LRP6e3e4 | | | | | | |
| 010S-E05 | LRP6e3e4 | | | | | | |
| 010S-F05 | LRP6e3e4 | | | | | | |
| 013S-G04 | LRP6e3e4 | | | | | | |
| 013S-H04 | LRP6e3e4 | | | | | | |
| 013S-A05 | LRP6e3e4 | | | | | | |
| 013S-B05 | LRP6e3e4 | | | | | | |
| 013S-C05 | LRP6e3e4 | | | | | | |
| 013S-D05 | LRP6e3e4 | | | | | | |
| 013S-E05 | LRP6e3e4 | RASQSISSYLN | 2094 | AASSLQS | 2110 | CQQSYSTPLTF | 2174 |
| 013S-F05 | LRP6e3e4 | RASQSISSYLN | 2094 | AASSLQS | 2110 | CQQSYSTPLTF | 2174 |
| 013S-G05 | LRP6e3e4 | RASQDISNYLN | 2079 | AASTLQS | 2113 | CQQGNSFPYTF | 2152 |
| 010S-G06 | LRP6e3e4 | QASQDISNYLN | 2077 | AASSLQS | 2110 | CQQSYRIHWTF | 2163 |
| 009S-B05 | LRP6e3e4 | RASQSISSYLN | 2094 | AASSLQS | 2110 | CQQSYSTPLTF | 2174 |
| 009S-C05 | LRP6e3e4 | | | | | | |
| 009S-D05 | LRP6e3e4 | RASQSISSYLN | 2094 | AASSLQS | 2110 | CQQSYSTPLTF | 2174 |
| 009S-E05 | LRP6e3e4 | RASQGINSYLA | 2081 | DAKGLHP | 2114 | CQQSYSAPLSF | 2166 |
| 009S-F05 | LRP6e3e4 | RASQSISSYLN | 2094 | AASSLQS | 2110 | CQQSYSTPLTF | 2174 |
| 009S-G05 | LRP6e3e4 | QASQDISNYLN | 2077 | AASTLQR | 2112 | CQQSYSAPLTF | 2167 |
| 009S-C06 | LRP6e3e4 | RASRNINRYLN | 2099 | AASSLLS | 2109 | CQQSYNVPFTF | 2162 |
| 009S-D06 | LRP6e3e4 | RASQSISSYLN | 2094 | AASSLQS | 2110 | CQQSYSTPLTF | 2174 |
| 009S-E06 | LRP6e3e4 | RASQSISSYLN | 2094 | AASSLQS | 2110 | CQQSYSTPLTF | 2174 |
| 009S-F06 | LRP6e3e4 | RASQSISSYLN | 2094 | AASSLQS | 2110 | CQQSYSTPLTF | 2174 |
| 009S-G06 | LRP6e3e4 | RASQNIGLYLN | 2088 | DASSLQR | 2121 | CQQSYSTPYTF | 2176 |
| 009S-H06 | LRP6e3e4 | RASQSISSYLN | 2094 | AASSLQS | 2110 | CQQSYSTPLTF | 2174 |
| 009S-A07 | LRP6e3e4 | RASQSISSYLN | 2094 | AASSLQS | 2110 | CQQSYSTPLTF | 2174 |
| 009S-B07 | LRP6e3e4 | RASQSISSYLN | 2094 | AASSLQS | 2110 | CQQSYSTPLTF | 2174 |
| 009S-D07 | LRP6e3e4 | RSSQSLLHSNGY | 2102 | LGSNRAS | 2131 | CMQATQFPLTF | 2146 |
| | | NYLD | | | | | |
| 009S-F07 | LRP6e3e4 | RASQSISSYLN | 2094 | AASSLQS | 2110 | CQQSYSTPLTF | 2174 |
| 009S-G07 | LRP6e3e4 | RASQGISNYLA | 2083 | DASNLET | 2115 | CLQDFSFPWTF | 2140 |
| 009S-H07 | LRP6e3e4 | RASQSISSYLN | 2094 | AASSLQS | 2110 | CQQSYSTPLTF | 2174 |
| 009S-A08 | LRP6e3e4 | RASQGISNYLA | 2083 | GSSTLQS | 2127 | CQQTYSIPPTF | 2181 |
| 011S-C01 | LRP6e3e4 | RASQSISSYLN | 2094 | AASSLQS | 2110 | CQQSYSTPLTF | 2174 |
| 009S-C08 | LRP6e3e4 | RASQSISSYLN | 2094 | AASSLQS | 2110 | CQQSYSTPLTF | 2174 |
| 009S-D08 | LRP6e3e4 | RASQGISNNLN | 2082 | DASSLES | 2120 | CLQHNSYPFTF | 2143 |
| 011S-F01 | LRP6e3e4 | RASQDISNYLN | 2079 | AASSLQS | 2110 | CLQDYSYPRTF | 2141 |
| 009S-E08 | LRP6e3e4 | QASQDISNYLN | 2077 | DASSLES | 2120 | CQQSYRYPTF | 2165 |
| 009S-F08 | LRP6e3e4 | QASQDISNYLN | 2077 | DASSLES | 2120 | CQQSYSTSITF | 2177 |
| 009S-G08 | LRP6e3e4 | RASQSISSYLN | 2094 | AASSLQS | 2110 | CQQSYSTPLTF | 2174 |
| 009S-H08 | LRP6e3e4 | QASQDISNYLA | 2076 | AASSLQS | 2110 | CQQSYSTPLTF | 2174 |
| 009S-A09 | LRP6e3e4 | QASQGITNYLN | 2078 | AASSLQS | 2110 | CLQDYTDPFTF | 2142 |
| 011S-F02 | LRP6e3e4 | RASQSISSYLN | 2094 | AASSLQS | 2110 | CQQSYSTPLTF | 2174 |
| 011S-G02 | LRP6e3e4 | RASQGISSYLA | 2087 | AASSLQS | 2110 | CQQAYSFPWTF | 2150 |
| 011S-A03 | LRP6e3e4 | RASQSISSYLN | 2094 | AASSLQS | 2110 | CQQSYSTPLTF | 2174 |
| 011S-CO3 | LRP6e3e4 | QASQDISNYLN | 2077 | DASSLES | 2120 | CQQSYSFPPFTF | 2168 |
| 0115-D03 | LRP6e3e4 | RASQSISSYLA | 2093 | AASTLQS | 2113 | CQQSYSTPLTF | 2174 |
| 0115-F03 | LRP6e3e4 | KSSQSVLYTTTNR | 2073 | WASSRKS | 2135 | CQQYYSTPYTF | 2189 |
| | | NHIA | | | | | |
| 0115-C04 | LRP6e1e2 | GASQSVPRNSLA | 2066 | GASQRAT | 2124 | CQQYHNWPPEYTF | 2184 |
| 0115-D04 | LRP6e1e2 | RASQSISSYLN | 2094 | AASSLQS | 2110 | CQQSYSTPLTF | 2174 |
| 0115-H04 | LRP6e1e2 | QASQDISNYLN | 2077 | AASTLQS | 2113 | CQQSFSTPRTF | 2156 |
| 0085-F02 | LRP5 | RSSQSLLHSDGYT | 2101 | TLSYRAS | 2134 | CMQALEALFTF | 2144 |
| | | YLY | | | | | |
| 010S-C06 | LRP6e1e2 | RASQSISSYLN | 2094 | AASSLQS | 2110 | CQQSYSTPLTF | 2174 |
| 010S-E06 | LRP6e3e4 | RASQSISSYLN | 2094 | AASSLQS | 2110 | CQQSYSTPLTF | 2174 |
| 010S-F06 | LRP6e3e4 | RASQSISSYLN | 2094 | AASSLQS | 2110 | CQQSYSTPLTF | 2174 |
| 010S-H06 | LRP6e3e4 | RASQSISSYLN | 2094 | AASSLQS | 2110 | CQQSYSTPLTF | 2174 |
| 010S-A07 | LRP6e3e4 | RASQSISSYLN | 2094 | AASSLQS | 2110 | CQQSYSTPLTF | 2174 |
| 010S-B07 | LRP6e3e4 | RASQSISSYLN | 2094 | AASSLQS | 2110 | CQQSYSTPLTF | 2174 |
| 010S-C07 | LRP6e3e4 | RASQSISSYLN | 2094 | AASSLQS | 2110 | CQQSYSTPLTF | 2174 |
| 010S-D07 | LRP6e3e4 | RASQSISSYLN | 2094 | AASSLQS | 2110 | CQQSYSTPLTF | 2174 |
| 009S-D05 | LRP6e3e4 | RASQSISSYLN | 2094 | AASSLQS | 2110 | CQQSYSTPLTF | 2174 |
| 009S-E05 | LRP6e3e4 | RASQGINSYLA | 2081 | DAKGLHP | 2114 | CQQSYSAPLSF | 2166 |
| 010S-E07 | LRP6e3e4 | RASQSISSYLN | 2094 | AASSLQS | 2110 | CQQSYSTPLTF | 2174 |
| 009S-F05 | LRP6e3e4 | RASQSISSYLN | 2094 | AASSLQS | 2110 | CQQSYSTPLTF | 2174 |
| 010S-F07 | LRP6e3e4 | RASQSVYSNLA | 2097 | DTSNRAT | 2123 | CQQYNNWPPITF | 2185 |
| 010S-G07 | LRP6e3e4 | RVSQGISSYLN | 2103 | AASSLQS | 2110 | CQQTYTIPFTF | 2182 |
| 009S-G05 | LRP6e3e4 | QASQDISNYLN | 2077 | AASTLQR | 2112 | CQQSYSAPLTF | 2167 |
| 010S-H07 | LRP6e3e4 | QASQDISNYLN | 2077 | GTSNLQS | 2128 | CQQSYSTPYTF | 2176 |
| 010S-A08 | LRP6e3e4 | RASQSISSYLN | 2094 | AASSLQS | 2110 | CQQSYSTPLTF | 2174 |
| 009S-A07 | LRP6e3e4 | RASQSISSYLN | 2094 | AASSLQS | 2110 | CQQSYSTPLTF | 2174 |
| 009S-B07 | LRP6e3e4 | RASQSISSYLN | 2094 | AASSLQS | 2110 | CQQSYSTPLTF | 2174 |
| 009S-B06 | LRP6e3e4 | RVSQSISSYLN | 2103 | AASSLQS | 2110 | CQQSYSTPLTF | 2174 |
| 010S-B08 | LRP6e3e4 | RASQGISNNLN | 2082 | DASNLET | 2115 | CQQSYTSRLTF | 2179 |
| 010S-C08 | LRP6e3e4 | RASQSISSYLN | 2094 | AASSLQS | 2110 | CQQSYSTPLTF | 2174 |
| 009S-C06 | LRP6e3e4 | RASRNINRYLN | 2099 | AASSLLS | 2109 | CQQSYNVPFTF | 2162 |
| 009S-D06 | LRP6e3e4 | RASQSISSYLN | 2094 | AASSLQS | 2110 | CQQSYSTPLTF | 2174 |
| 010S-D08 | LRP6e3e4 | RASQSISSYLN | 2094 | AASSLQS | 2110 | CQQSYSTPLTF | 2174 |
| 009S-E06 | LRP6e3e4 | RASQSISSYLN | 2094 | AASSLQS | 2110 | CQQSYSTPLTF | 2174 |
| 010S-E08 | LRP6e3e4 | RASQSISSYLN | 2094 | ZASSLQS | 2137 | CQQSYSTPLTF | 2174 |
| 010S-F08 | LRP6e3e4 | RASQSISSYLN | 2094 | AASSLQS | 2110 | CQQSYSTPLTF | 2174 |
| 009S-F06 | LRP6e3e4 | RASQSISSYLN | 2094 | AASSLQS | 2110 | CQQSYSTPLTF | 2174 |
| 010S-G08 | LRP6e3e4 | RASQSVRSSDLA | 2096 | GSSSRAT | 2126 | CQQYGRSPRYSF | 2183 |
| 010S-H08 | LRP6e3e4 | RASQSISSYLN | 2094 | AASSLQS | 2110 | CQQSYSTPLTF | 2174 |
| 010S-A09 | LRP6e3e4 | QASQDIANYLN | 2075 | AASSLQS | 2110 | CQQSYSTPYTF | 2176 |
| 010S-B09 | LRP6e3e4 | RASQSISRYLN | 2092 | KASSLES | 2130 | CQQSYDSPWTF | 2159 |
| 009S-G06 | LRP6e3e4 | RASQNIGLYLN | 2088 | DASSLQR | 2121 | CQQSYSTPYTF | 2176 |
| 010S-C09 | LRP6e3e4 | RASQSISSYLN | 2094 | AASSLQS | 2110 | CQQSYSTPLTF | 2174 |
| 009S-H06 | LRP6e3e4 | RASQSISSYLN | 2094 | AASSLQS | 2110 | CQQSYSTPLTF | 2174 |
| 010S-D09 | LRP6e3e4 | QASQDISNYLN | 2077 | AASSLQS | 2110 | CQQIHSYPLTF | 2155 |
| 010S-E09 | LRP6e3e4 | RASQSISSYLN | 2094 | AASSLQS | 2110 | CQQSYSTPLTF | 2174 |
| 009S-A07 | LRP6e3e4 | RASQSISSYLN | 2094 | AASSLQS | 2110 | CQQSYSTPLTF | 2174 |
| 009S-B07 | LRP6e3e4 | RASQSISSYLN | 2094 | AASSLQS | 2110 | CQQSYSTPLTF | 2174 |
| 009S-D08 | LRP6e3e4 | RASQGISNNLN | 2082 | DASSLES | 2120 | CLQHNSYPFTF | 2143 |
| 010S-F09 | LRP6e3e4 | RASQSISSYLN | 2094 | AASSLQS | 2110 | CQQSYSTPLTF | 2174 |
| 010S-G09 | LRP6e3e4 | QASQDISNYLN | 2077 | DASNLET | 2115 | CQQSYSTPLTF | 2174 |
| 010S-H09 | LRP6e3e4 | RASQGISNYLN | 2084 | AASTLQS | 2113 | CQQGYGTPPMF | 2153 |
| 010S-A10 | LRP6e3e4 | RASQSISSYLN | 2094 | AASSLQS | 2110 | CQQSYSTPLTF | 2174 |
| 009S-D07 | LRP6e3e4 | RSSQSLLHSNGY | 2102 | LGSNRAS | 2131 | CMQATQFPLTF | 2146 |
| | | NYLD | | | | | |
| 010S-B10 | LRP6e3e4 | RASQSISSYLN | 2094 | GTSSLHT | 2129 | CQQANSFPFTF | 2148 |
| 010S-C10 | LRP6e3e4 | KSSQSILSSSSNR | 2072 | WASSRKS | 2135 | CQQYYNIPYSF | 2187 |
| | | DSLA | | | | | |
| 009S-E07 | LRP6e3e4 | RASQSISSYLN | 2094 | AASSLQS | 2110 | CQQSYSTPLTF | 2174 |
| 010S-D10 | LRP6e3e4 | RASQSISSYLN | 2094 | AASSLQS | 2110 | CQQSYSTPLTF | 2174 |
| 010S-E10 | LRP6e3e4 | RASQSISSYLN | 2094 | AASSLQS | 2110 | CQQSYSTPLTF | 2174 |
| 010S-F10 | LRP6e3e4 | RASQSISNYLN | 2090 | AASTLES | 2111 | CQQANSFPPTF | 2148 |
| 010S-G10 | LRP6e3e4 | RASQGISNYLA | 2083 | AASSLQS | 2110 | CQQSYSTPWTF | 2175 |
| 009S-F07 | LRP6e3e4 | RASQSISSYLN | 2094 | AASSLQS | 2110 | CQQSYSTPLTF | 2174 |
| 009S-G07 | LRP6e3e4 | RASQGISNYLA | 2083 | DASNLET | 2115 | CLQDFSFPWTF | 2140 |
| 010S-H10 | LRP6e3e4 | KSSHSLLYSSDNK | 2071 | WSSTRES | 2136 | CQQYYSTPQTF | 2188 |
| | | NYLA | | | | | |
| 010S-All | LRP6e3e4 | RASQSIZNYLN | 2095 | ZASTLES | 2138 | CQQANSFPPTF | 2148 |
| 010S-B11 | LRP6e3e4 | QASQDISNYLN | 2077 | AASTLQS | 2113 | CQQSYSTPLTF | 2174 |
| 010S-C11 | LRP6e3e4 | RASQSISSYLN | 2094 | AASSLQS | 2110 | CQQSYSTPLTF | 2174 |
| 009S-H07 | LRP6e3e4 | RASQSISSYLN | 2094 | AASSLQS | 2110 | CQQSYSTPLTF | 2174 |
| 009S-A08 | LRP6e3e4 | RASQGISNYLA | 2083 | GSSTLQS | 2127 | CQQTYSIPPTF | 2181 |
| 010S-D11 | LRP6e3e4 | RASQSVSSNLA | 2097 | GASTRAT | 2125 | CQQFDRSPLTF | 2151 |
| 010S-Ell | LRP6e3e4 | RASQSISSYLN | 2094 | AASSLQS | 2110 | CQQSYSTPLTF | 2174 |
| 010S-F11 | LRP6e3e4 | RASQSISSYLN | 2094 | AASSLQS | 2110 | CQQSYSTPLTF | 2174 |
| 010S-G11 | LRP6e3e4 | RASQSISSYLN | 2094 | AASSLQS | 2110 | CQQSYSTPLTF | 2174 |
| 010S-H11 | LRP6e3e4 | RASQDISSYLA | 2080 | SASTLQS | 2133 | CQQSNSFPYTF | 2157 |
| 009S-B08 | LRP6e3e4 | RASQSISSYLN | 2094 | ZASSLQS | 2137 | CQQSYSTPLTF | 2174 |
| 010S-Al2 | LRP6e3e4 | RASQSISSYLN | 2094 | AASSLQS | 2110 | CQQSYSTPLTF | 2174 |
| 010S-B12 | LRP6e3e4 | RASQSISSYLN | 2094 | AASSLQS | 2110 | CQQSYSTPLTF | 2174 |
| 010S-C12 | LRP6e3e4 | RASQSISSYLN | 2094 | AASSLQS | 2110 | CQQSYSTPLTF | 2174 |
| 010S-D12 | LRP6e3e4 | RPSQSIGSWLA | 2100 | DASNLQS | 2116 | CQQSSSTPYTF | 2158 |
| 010S-E12 | LRP6e3e4 | RASQSISSYLN | 2094 | AASSLQS | 2110 | CQQSYSTPLTF | 2174 |
| 010S-F12 | LRP6e3e4 | RASQGISRDLA | 2085 | AASTLQS | 2113 | CQQSYSPPFTF | 2172 |
| 010S-G12 | LRP6e3e4 | RASQSISSYLN | 2094 | AASSLQS | 2110 | CQQSYSTPLTF | 2174 |
| 011S-A01 | LRP6e3e4 | RASQSISSYLN | 2094 | AASSLQS | 2110 | CQQSYSTPLTF | 2174 |
| 011S-B01 | LRP6e3e4 | RASQGISNYLA | 2083 | AASSLHS | 2108 | CQQSYRTPLTF | 2164 |
| 011S-C01 | LRP6e3e4 | RASQSISSYLN | 2094 | AASSLQS | 2110 | CQQSYSTPLTF | 2174 |
| 011S-D01 | LRP6e3e4 | RASQGISNYLA | 2083 | AASSLQS | 2110 | CQQSYSTPLTF | 2174 |
| 009S-C08 | LRP6e3e4 | RASQSISSYLN | 2094 | AASSLQS | 2110 | CQQSYSTPLTF | 2174 |
| 011S-E01 | LRP6e3e4 | RASQGISSALA | 2086 | AASTLQS | 2113 | CQQSYSSPPTF | 2173 |
| 009S-D08 | LRP6e3e4 | RASQGISNNLN | 2082 | DASSLES | 2120 | CLQHNSYPFTF | 2143 |
| 011S-F01 | LRP6e3e4 | RASQDISNYLN | 2079 | AASSLQS | 2110 | CLQDYSYPRTF | 2141 |
| 009S-E08 | LRP6e3e4 | QASQDISNYLN | 2077 | DASSLES | 2120 | CQQSYRYPTF | 2165 |
| 009S-F08 | LRP6e3e4 | QASQDISNYLN | 2077 | DASSLES | 2120 | CQQSYSTSITF | 2177 |
| 011S-G01 | LRP6e3e4 | RASQSISSYLN | 2094 | AASSLQS | 2110 | CQQSYSTPLTF | 2174 |
| 011S-H01 | LRP6e3e4 | RASQSISSYLN | 2094 | AASSLQS | 2110 | CQQSYSTPLTF | 2174 |
| 011S-A02 | LRP6e3e4 | RSSQSLLHSNGY | 2102 | AASSLQS | 2110 | CMQALQTPITF | 2145 |
| | | NYLD | | | | | |
| 011S-B02 | LRP6e3e4 | RZSQSZSZYLN | 2104 | AASSLQS | 2110 | CQQSYSTPLTF | 2174 |
| 011S-0O2 | LRP6e3e4 | QASQDISNYLN | 2077 | AASILQS | 2107 | CQQSYSIPFTF | 2169 |
| 009S-G08 | LRP6e3e4 | RASQSISSYLN | 2094 | AASSLQS | 2110 | CQQSYSTPLTF | 2174 |
| 011S-D02 | LRP6e3e4 | RASQSISSYLN | 2094 | AASSLQS | 2110 | CQQSYSTPLTF | 2174 |
| 009S-H08 | LRP6e3e4 | QASQDISNYLA | 2076 | AASSLQS | 2110 | CQQSYSTPLTF | 2174 |
| 011S-E02 | LRP6e3e4 | RASQSISSYLN | 2094 | AASSLQS | 2110 | CQQSYSTPLTF | 2174 |
| 009S-A09 | LRP6e3e4 | QASQGITNYLN | 2078 | AASSLQS | 2110 | CLQDYTDPFTF | 2142 |
| 011S-F02 | LRP6e3e4 | RASQSISSYLN | 2094 | AASSLQS | 2110 | CQQSYSTPLTF | 2174 |
| 011S-G02 | LRP6e3e4 | RASQGISSYLA | 2087 | AASSLQS | 2110 | CQQAYSFPWTF | 2150 |
| 011S-H02 | LRP6e3e4 | RASQSISSYLN | 2094 | AASSLQS | 2110 | CQQSYSTPLTF | 2174 |
| 009S-B09 | LRP6e3e4 | QASQDISNYLN | 2077 | AASSLQS | 2110 | CQQSYNTPRTF | 2161 |
| 009S-C09 | LRP6e3e4 | QASQDISNYLN | 2077 | DASNLET | 2115 | CQQSYTTPFTF | 2180 |
| 011S-A03 | LRP6e3e4 | RASQSISSYLN | 2094 | AASSLQS | 2110 | CQQSYSTPLTF | 2174 |
| 011S-B03 | LRP6e3e4 | RASQSISSYLN | 2094 | AASSLQS | 2110 | CQQSYSTPLTF | 2174 |
| 011S-CO3 | LRP6e3e4 | QASQDISNYLN | 2077 | DASSLES | 2120 | CQQSYSFPPFTF | 2168 |
| 011S-D03 | LRP6e3e4 | RASQSISSYLA | 2093 | AASTLQS | 2113 | CQQSYSTPLTF | 2174 |
| 009S-F09 | LRP6e3e4 | RASQSISSYLN | 2094 | AASSLQS | 2110 | CQQSYSTPLTF | 2174 |
| 011S-E03 | LRP6e3e4 | KSSHSLLSTSTNR | 2070 | WASSRKS | 2135 | CQQYNNWPYTF | 2186 |
| | | NQLA | | | | | |
| 009S-G09 | LRP6e3e4 | RASQGISNYLA | 2083 | SASSLQS | 2132 | CQQGYNTPRTF | 2154 |
| 011S-F03 | LRP6e3e4 | KSSQSVLYTTTNR | 2074 | WASSRKS | 2135 | CQQYYSTPYTF | 2189 |
| | | NHIA | | | | | |
| 009S-H09 | LRP6e3e4 | KSSHSLLSTSTNR | 2069 | WASSRKS | 2135 | CQQYYNIPYSF | 2187 |
| | | NHLA | | | | | |
| 011S-G03 | LRP6e3e4 | RASQGISSYLA | 2087 | DASNLET | 2115 | CQQANSLFTF | 2149 |
| 009S-A10 | LRP6e3e4 | RASQSISRWLA | 2091 | AASSLQS | 2110 | CQQAYSFPWTF | 2150 |
| 009S-B10 | LRP6e3e4 | RASQSISSYLN | 2094 | AASSLQS | 2110 | CQQSYSTPLTF | 2174 |
| 011S-B04 | LRP6e1e2 | RASQSISSYLN | 2094 | AASSLQS | 2110 | CQQSYSTPLTF | 2174 |
| 011S-C04 | LRP6e1e2 | GASQSVPRNSLA | 2066 | GASQRAT | 2124 | CQQYHNWPPEYTF | 2184 |
| 011S-D04 | LRP6e1e2 | RASQSISSYLN | 2094 | AASSLQS | 2110 | CQQSYSTPLTF | 2174 |
| 011S-E04 | LRP6e1e2 | WASQSVRGNYV | 2106 | DASNRAA | 2117 | CQHRSNWPLTF | 2147 |
| | | A | | | | | |
| 011S-F04 | LRP6e1e2 | HGSQDISNYLN | 2067 | DASNRQS | 2119 | CQQSFSTPRTF | 2156 |
| 011S-H04 | LRP6e1e2 | QASQDISNYLN | 2077 | AASTLQS | 2113 | CQQSFSTPRTF | 2156 |
| 011S-A05 | LRP6e1e2 | WASQSVRGNYV | 2106 | DASNRAG | 2118 | CQHRSNWPLTF | 2147 |
| | | A | | | | | |
| 011S-B05 | LRP6e1e2 | RASQSISSYLN | 2094 | AASSLQS | 2110 | CQQSYSTPLTF | 2174 |
| 011S-C05 | LRP6e1e2 | WASQSVRGNYV | 2106 | DASNRAA | 2117 | CQHRSNWPLTF | 2147 |
| | | A | | | | | |
| 1115.3 | LRP6e1e2 | KASQSISYNLH | 2217 | YTSQSIS | 2220 | QQSNSWPLT | 2223 |
| 421.1 | LRP6e1e2 | SANSSVRFMF | 2218 | RTSNLAS | 2221 | QQYHSYPWT | 2224 |
| YW211.31 | LRP6e3e4 | RASQDVSTAVA | 2219 | SASFLYS | 2222 | QQSYTTPPT | 2225 |
| .57 | | | | | | | |

TABLE 2B
Anti-LRP5/6 Antibody Clone IDs, Heavy Chain
(HC) Seq ID Nos, and Binding Characteristics.

| Clone ID | HC Seq ID NO | Confirmed Binding |
|---|---|---|
| 001S-F11 | 74 | LRP6e1e2 |
| 009S-G02 | 75 | LRP6e1e2 |
| 009S-A03 | 76 | LRP6e1e2 |
| 009S-D03 | 77 | LRP6e1e2 |
| 009S-F03 | 78 | LRP6e1e2 |
| 009S-H03 | 79 | LRP6e1e2 |
| 009S-A04 | 80 | LRP6e1e2 |
| 009S-B04 | 81 | LRP6e3e4 |
| 009S-D04 | 82 | LRP6e3e4 |
| 009S-E04 | 83 | LRP6e3e4 |
| 009S-F04 | 84 | LRP6e3e4 |
| 009S-G04 | 85 | LRP6e3e4 |
| 009S-H04 | 86 | LRP6e3e4 |
| 009S-A05 | 87 | LRP6e3e4 |
| 013S-G04 | 88 | LRP6e3e4 |
| 013S-H04 | 89 | LRP6e3e4 |
| 013S-C05 | 90 | LRP6e3e4 |
| 013S-D05 | 91 | LRP6e3e4 |
| 013S-G04 | 92 | LRP6e3e4 |
| 013S-H04 | 93 | LRP6e3e4 |
| 013S-A05 | 94 | LRP6e3e4 |
| 013S-C05 | 95 | LRP6e3e4 |
| 013S-D05 | 96 | LRP6e3e4 |
| 008S-D01 | 97 | LRP5 |

[0162] In certain embodiments, the LRP5/6 binding region may be selected from any binding domain that binds LRP5 or LRP6 with a K_{D} of less than or equal to about 1×10⁻⁴ M, less than or equal to about 1×10⁻⁵ M, less than or equal to about 1×10⁻⁶ M, less than or equal to about 1×10⁻⁷ M, less than or equal to about 1×10⁻⁸ M, less than or equal to about 1×10⁻⁹ M, less than or equal to about 1×10⁻¹⁰ M, less than or equal to about 1×10⁻¹¹ M, less than or equal to about 1×10⁻¹² M, less than or equal to about 1×10⁻¹³ M, less than or equal to about 1×10⁻¹⁴ M, or less than or equal to 1×10⁻¹⁵ M in the context of a Wnt surrogate molecule. In certain embodiment, the LRP5/6 binding region may be selected from any binding domain that binds LRP5 or LRP6 with a K_{D} of greater than or equal to about 1×10⁻⁴ M, greater than or equal to about 1×10⁻⁵ M, greater than or equal to about 1×10⁻⁶ M, greater than or equal to about 1×10⁻⁷ M, greater than or equal to about 1×10⁻⁸ M, greater than or equal to about 1×10⁻⁹ M, greater than about 1×10⁻¹⁰ M, greater than or equal to about 1×10⁻¹¹ M, greater than or equal to about 1×10⁻¹² M, greater than or equal to about 1×10⁻¹³ M, greater than or equal to about 1×10⁻¹⁴ M, or greater than or equal to 1×10⁻¹⁵ M in the context of a Wnt surrogate molecule. In certain embodiment, the LRP5/6 binding region may be selected from any binding domain that binds LRP5 or LRP6 at high affinity, e.g. a K_{D} of less than about 1×10⁻⁷ M, less than about 1×10⁻⁸ M, less than about 1×10⁻⁹ M, or less than about 1×10⁻¹⁰ M.

[0163] Other suitable LRP5/6 binding region include, without limitation, de novo designed LRP5/6 binding proteins, antibody derived binding proteins, e.g., scFv, Fab, etc., and other portions of antibodies that specifically bind to one or more Fzd proteins; VHH or sdAb derived binding domains; knottin-based engineered scaffolds; naturally occurring LRP5/6, including without limitation, DKK1, DKK2, DKK3, DKK4, sclerostin; Wise; fusions proteins comprising any of the above; derivatives of any of the above; variants of any of the above; and biologically active fragments of any of the above, and the like. A LRP5/6 binding region may be affinity selected to enhance binding.

[0164] Members of the Dickkopf (DKK) gene family (see Krupnik et al. (1999) Gene 238(2):301-13) include DKK-1, DKK-2, DKK-3, and DKK-4, and the DKK-3 related protein Soggy (Sgy). hDKKs 1-4 contain two distinct cysteine-rich domains in which the positions of 10 cysteine residues are highly conserved between family members. Exemplary sequences of human Dkk genes and proteins are publicly available, e.g., Genbank accession number NM_014419 (soggy-1); NM 014420 (DKK4); AF177394 (DKK-1); AF177395 (DKK-2); NM_015881 (DKK3); and NM_014421 (DKK2). In some embodiments of the disclosure, the LRP6 binding moiety is a DKK1 peptide, including without limitation the C-terminal domain of human DKK1. The C-terminal domain may comprise the sequence:

(SEQ ID NO: 2249)
KMYHTKGQEGSVCLRSSDCASGLCCARHFWSKICKPVLKEGQVCTKHRRK
GSHGLEIFQRCYCGEGLSCRIQKDHHQASNSSRLHTCQRH

(see Genbank accession number NP_036374) or a biologically active fragment thereof.

[0165] Binding of DKK proteins to LRP5/6 are discussed, for example in Brott and Sokol Mol. Cell. Biol. 22 (17), 6100-6110 (2002); and Li et al. J. Biol. Chem. 277 (8), 5977-5981 (2002), each herein specifically incorporated by reference. The corresponding region of human DKK2 (Genbank reference NP_055236) may comprise the sequence:

(SEQ ID NO: 2250)
KMSHIKGHEGDPCLRSSDCIEGFCCARHFWTKICKPVLHQGEVCTKQRKK
GSHGLEIFQRCDCAKGLSCKVWKDATYSSKARLHVCQK,

[0166] or a biologically active fragment thereof.

[0167] Antibodies that specifically bind to LRP5 or LRP6 are known in the art and are commercially available, or can be generated de novo. LRP5, LRP6 or fragments thereof can be used as an immunogen or in screening assays to develop an antibody. Examples of known antibodies include, without limitation, those described in Gong et al. (2010) PLoS One. 5(9):e12682; Ettenberg et al. (2010) Proc Natl Acad Sci USA. 107(35):15473-8; and those commercially available from, for example Santa Cruz biotechnology antibody clone 1A12, which was raised against synthetic LRP5/6 of human origin and binds to both the full length and proteolytic fragment of LRP6 and LRP5 of mouse and human origin; the monoclonal antibody 2611; Cell Signaling Technology antibody specific for LRP5 (D80F2), catalog number 5731; etc.

[0168] In certain embodiments, Wnt surrogate molecules disclosed herein comprise one or more polypeptides comprising two or more binding regions. For example, the two or more binding regions may be two or more Fzd binding regions or two or more LRP5/6 binding regions, or they may comprise one or more Fzd binding regions and one or more LRP5/6 binding regions. The binding regions may be directly joined or contiguous, or may be separated by a linker, e.g. a polypeptide linker, or a non-peptidic linker, etc. The length of the linker, and therefore the spacing between the binding domains can be used to modulate the signal strength, and can be selected depending on the desired use of the Wnt surrogate molecule. The enforced distance between binding domains can vary, but in certain embodiments may be less than about 100 angstroms, less than about 90 angstroms, less than about 80 angstroms, less than about 70 angstroms, less than about 60 angstroms, or less than about 50 angstroms. In some embodiments the linker is a rigid linker, in other embodiments the linker is a flexible linker. In certain embodiments where the linker is a peptide linker, it may be from about 1, 2, 3, 4, 5, 6, 7, 8, 9, 10, 11, 12, 13, 14, 15, 16, 17, 18, 19, 20 21, 22, 23, 24, 25, 26, 27, 28, 29, 30 or more amino acids in length, and is of sufficient length and amino acid composition to enforce the distance between binding domains. In some embodiments, the linker comprises or consists of one or more glycine and/or serine residues.

[0169] In particular embodiments, a Wnt surrogate molecule comprises a polypeptide sequence having at least 90%, at least 95%, at least 98% or at least 99% identity to a polypeptide sequence disclosed in any of SEQ ID NOs: 109-124 or 125-157, or having at least 90%, at least 95%, at least 98% or at least 99% identity to an antigen-binding fragment of a polypeptide sequence disclosed in any of SEQ ID NOs:109-124 or 125-157. In certain embodiments, the Wnt surrogate molecules comprises or consists of a polypeptide sequence set forth in any of SEQ ID NOs:109-124 or 125-147, or an antigen-binding fragment thereof. In particular embodiments, the antigen-binding fragment binds one or more Fzd receptors and also binds LRP5 and/or LRP6.

[0170] Wnt surrogate molecule can be multimerized, e.g., through an Fc domain, by concatenation, coiled coils, polypeptide zippers, biotin/avidin or streptavidin multimerization, and the like. The Wnt surrogate molecules can also be joined to a moiety such as PEG, Fc, etc., as known in the art to enhance stability in vivo.

[0171] In certain embodiments, a Wnt surrogate molecule directly activates canonical Wnt signaling through binding to one or more Fzd proteins and to LRP5/6, particularly by binding to these proteins on a cell surface, e.g., the surface of a human cell. The direct activation of Wnt signaling by a Wnt surrogate molecule is in contrast to potentiation of Wnt signaling, which enhances activity only when native Wnt proteins are present.

[0172] Wnt surrogate molecules may activate Wnt signaling, e.g., by mimicking the effect or activity of a Wnt protein binding to a frizzled protein. The ability of the Wnt surrogate molecules of the present disclosure to mimic the activity of Wnt can be confirmed by a number of assays. The Wnt surrogate molecules typically initiate a reaction or activity that is similar to or the same as that initiated by the receptor's natural ligand. In particular, the Wnt surrogate molecules of the present disclosure enhance the canonical Wnt/β-catenin signaling pathway. As used herein, the term “enhances” refers to a measurable increase in the level of Wnt/β-catenin signaling compared with the level in the absence of a Wnt surrogate molecule of the present disclosure.

[0173] Various methods are known in the art for measuring the level of canonical Wnt/β-catenin signaling. These include, but are not limited to assays that measure: Wnt/β-catenin target gene expression; TCF reporter gene expression; β-catenin stabilization; LRP phosphorylation; Axin translocation from cytoplasm to cell membrane and binding to LRP. The canonical Wnt/β-catenin signaling pathway ultimately leads to changes in gene expression through the transcription factors TCF7, TCF7L1, TCF7L2 and LEF. The transcriptional response to Wnt activation has been characterized in a number of cells and tissues. As such, global transcriptional profiling by methods well known in the art can be used to assess Wnt/β-catenin signaling activation or inhibition.

[0174] Changes in Wnt-responsive gene expression are generally mediated by TCF and LEF transcription factors. A TCF reporter assay assesses changes in the transcription of TCF/LEF controlled genes to determine the level of Wnt/β-catenin signaling. A TCF reporter assay was first described by Korinek, V. et al., 1997. Also known as TOP/FOP this method involves the use of three copies of the optimal TCF motif CCTTTGATC, or three copies of the mutant motif CCTTTGGCC, upstream of a minimal c-Fos promoter driving luciferase expression (pTOPFI_ASH and pFOPFI_ASH, respectively) to determine the transactivational activity of endogenous β-catenin/TCF4. A higher ratio of these two reporter activities (TOP/FOP) indicates higher β-catenin/TCF4 activity, whereas a lower ratio of these two reporter activities indicates lower β-catenin/TCF4 activity.

[0175] Various other reporter transgenes that respond to Wnt signals exist intact in animals and therefore, effectively reflect endogenous Wnt signaling. These reporters are based on a multimerized TCF binding site, which drives expression of LacZ or GFP, which are readily detectable by methods known in the art. These reporter genes include: TOP-GAL, BAT-GAL, ins-TOPEGFP, ins-TOPGAL, LEF-EGFP, Axin2-LacZ, Axin2-d2EGFP, Lgr5tm1 (cre/ERT2), TOPdGFP.

[0176] The recruitment of dephosphorylated β-catenin to the membrane, stabilization and phosphorylation status of β-catenin, and translocation of β-catenin to the nucleus (Klapholz-Brown Z et al., PLoS One. 2(9) e945, 2007), in some cases mediated by complex formation with TCF transcription factors and TNIK are key steps in the Wnt signaling pathway. Stabilization is mediated by Disheveled family proteins that inhibit the “destruction” complex so that degradation of intracellular β-catenin is reduced, and translocation of β-catenin to the nucleus follows thereafter. Therefore, measuring the level and location of β-catenin in a cell is a good reflection of the level of Wnt/β-catenin signaling. A non-limiting example of such an assay is the “Biolmage β-Catenin Redistribution Assay” (Thermo Scientific) which provides recombinant U20S cells that stably express human β-catenin fused to the C-terminus of enhanced green fluorescent protein (EGFP). Imaging and analysis is performed with a fluorescence microscope or HCS platform allowing the levels and distribution of EGFP-β-catenin to be visualized.

[0177] Another way, in which the destruction complex is inhibited, is by removal of Axin by recruitment of Axin to the cytoplasmic tail of the Wnt co-receptor LRP. Axin has been shown to bind preferentially to a phosphorylated form of the LRP tail. Visualization of Axin translocation, for example with a GFP-Axin fusion protein, is therefore another method for assessing levels of Wnt/β-catenin signaling.

[0178] In certain embodiments, a Wnt surrogate molecule enhances or increases canonical Wnt pathway signaling, e.g., β-catenin signaling, by at least 30%, 35%, 40%, 45%, 50%, 60%, 70%, 75%, 80%, 85%, 90%, 95%, 100%, 110%, 150%, 200%, 250%, 300%, 400% or 500%, as compared to the β-catenin signaling induced by a neutral substance or negative control as measured in an assay described above, for example as measured in the TOPFlash assay. A negative control may be included in these assays. In particular embodiments, Wnt surrogate molecules may enhance β-catenin signaling by a factor of 2×, 5×, 10×, 100×, 1000×, 10000× or more as compared to the activity in the absence of the Wnt surrogate molecule when measured in an assay described above, for example when measured in the TOPFIash assay, or any of the other assays mentioned herein.

[0179] “Wnt gene product” or “Wnt polypeptide” when used herein encompass native sequence Wnt polypeptides, Wnt polypeptide variants, Wnt polypeptide fragments and chimeric Wnt polypeptides. In particular embodiments, a Wnt polypeptide is a native human full length mature Wnt protein.

[0180] For example, human native sequence Wnt proteins of interest in the present application include the following: Wnt-1 (GenBank Accession No. NM_005430); Wnt-2 (GenBank Accession No. NM_003391); Wnt-2B (Wnt-13) (GenBank Accession No. NM_004185 (isoform 1), NM_024494.2 (isoform 2)), Wnt-3 (RefSeq.: NM_030753), Wnt3a (GenBank Accession No. NM_033131), Wnt-4 (GenBank Accession No. NM_030761), Wnt-5A (GenBank Accession No. NM_003392), Wnt-5B (GenBank Accession No. NM_032642), Wnt-6 (GenBank Accession No. NM_006522), Wnt-7A (GenBank Accession No. NM_004625), Wnt-7B (GenBank Accession No. NM_058238), Wnt-8A (GenBank Accession No. NM_058244), Wnt-8B (GenBank Accession No. NM_003393), Wnt-9A (Wnt-14) (GenBank Accession No. NM_003395), Wnt-9B (Wnt-15) (GenBank Accession No. NM_003396), Wnt-1 OA (GenBank Accession No. NM_025216), Wnt-10B (GenBank Accession No. NM_003394), Wnt-11 (GenBank Accession No. NM_004626), Wnt-16 (GenBank Accession No. NM_016087)). Although each member has varying degrees of sequence identity with the family, all encode small (i.e., 39-46 kD), acylated, palmitoylated, secreted glycoproteins that contain 23-24 conserved cysteine residues whose spacing is highly conserved (McMahon, A P et al., Trends Genet. 1992; 8: 236-242; Miller, J R. Genome Biol. 2002; 3(1): 3001.1-3001.15). Other native sequence Wnt polypeptides of interest include orthologs of the above from any mammal, including domestic and farm animals, and zoo, laboratory or pet animals, such as dogs, cats, cattle, horses, sheep, pigs, goats, rabbits, rats, mice, frogs, zebra fish, fruit fly, worm, etc.

[0181] “Wnt pathway signaling” or “Wnt signaling” is used herein to refer to the mechanism by which a biologically active Wnt exerts its effects upon a cell to modulate a cell's activity. Wnt proteins modulate cell activity by binding to Wnt receptors, including proteins from the Frizzled (Fzd) family of proteins, proteins from the ROR family of proteins, the proteins LRP5, LRP6 from the LRP family of proteins, the protein FRL1/crypto, and the protein Derailed/Ryk. Once activated by Wnt binding, the Wnt receptor(s) will activate one or more intracellular signaling cascades. These include the canonical Wnt signaling pathway; the Wnt/planar cell polarity (Wnt/PCP) pathway; the Wnt-calcium (Wnt/Ca²⁺) pathway (Giles, R H et al. (2003) Biochim Biophys Acta 1653, 1-24; Peifer, M. et al. (1994) Development 120: 369-380; Papkoff, J. et al (1996) Mol. Cell Biol. 16: 2128-2134; Veeman, M. T. et al. (2003) Dev. Cell 5: 367-377); and other Wnt signaling pathways as is well known in the art.

[0182] For example, activation of the canonical Wnt signaling pathway results in the inhibition of phosphorylation of the intracellular protein β-catenin, leading to an accumulation of β-catenin in the cytosol and its subsequent translocation to the nucleus where it interacts with transcription factors, e.g. TCF/LEF, to activate target genes. Activation of the Wnt/PCP pathway activates RhoA, c-Jun N-terminal kinase (JNK), and nemo-like kinase (NLK) signaling cascades to control such biological processes as tissue polarity and cell movement. Activation of the Wnt/Ca²⁺ by, for example, binding of Wnt-4, Wnt-5A or Wnt-11, elicits an intracellular release of calcium ions, which activates calcium sensitive enzymes like protein kinase C (PKC), calcium-calmodulin dependent kinase II (CamKII) or calcineurin (CaCN). By assaying for activity of the above signaling pathways, the biological activity of an antibody or antigen-binding fragment thereof, e.g., a Wnt surrogate molecule, can be readily determined.

[0183] In certain embodiments, functional properties of Wnt surrogate molecules may be assessed using a variety of methods known to the skilled person, including e.g., affinity/binding assays (for example, surface plasmon resonance, competitive inhibition assays), cytotoxicity assays, cell viability assays, cell proliferation or differentiation assays in response to a Wnt, cancer cell and/or tumor growth inhibition using in vitro or in vivo models, including but not limited to any described herein. The Wnt surrogate molecules described herein may also be tested for effects on Fzd receptor internalization, in vitro and in vivo efficacy, etc. Such assays may be performed using well-established protocols known to the skilled person (see, e.g., Current Protocols in Molecular Biology (Greene Publ. Assoc. Inc. & John Wiley & Sons, Inc., NY, NY); Current Protocols in Immunology (Edited by: John E. Coligan, Ada M. Kruisbeek, David H. Margulies, Ethan M. Shevach, Warren Strober 2001 John Wiley & Sons, NY, NY); or commercially available kits.

[0184] In certain embodiments, an Fzd binding region of a Wnt surrogate molecule (e.g., an antigen-binding fragment of an anti-Fzd antibody) comprises one or more of the CDRs of the anti-Fzd antibodies described herein. In certain embodiments, a LRP5/6 binding region of a Wnt surrogate molecule (e.g., an antigen-binding fragment of an anti-LRP5/6 antibody) comprises one or more of the CDRs of the anti-LRP5/6 antibodies described herein. In this regard, it has been shown in some cases that the transfer of only the VHCDR3 of an antibody can be performed while still retaining desired specific binding (Barbas et al., PNAS (1995) 92: 2529-2533). See also, McLane et al., PNAS (1995) 92:5214-5218, Barbas et al., J. Am. Chem. Soc. (1994) 116:2161-2162.

[0185] Also disclosed herein is a method for obtaining an antibody or antigen-binding domain specific for a Fzd receptor, the method comprising providing by way of addition, deletion, substitution or insertion of one or more amino acids in the amino acid sequence of a VH domain set out herein or a VH domain which is an amino acid sequence variant of the VH domain, optionally combining the VH domain thus provided with one or more VL domains, and testing the VH domain or VH/VL combination or combinations to identify a specific binding member or an antibody antigen binding domain specific for one or more Fzd receptor and optionally with one or more desired properties. The VL domains may have an amino acid sequence which is substantially as set out herein. An analogous method may be employed in which one or more sequence variants of a VL domain disclosed herein are combined with one or more VH domains.

[0186] In particular embodiments, Wnt surrogate molecules are water soluble. By “water soluble” it is meant a composition that is soluble in aqueous buffers in the absence of detergent, usually soluble at a concentration that provides a biologically effective dose of the polypeptide. Compositions that are water soluble form a substantially homogenous composition that has a specific activity that is at least about 5% that of the starting material from which it was purified, usually at least about 10%, 20%, or 30% that of the starting material, more usually about 40%, 50%, or 60% that of the starting material, and may be about 50%, about 90% or greater. Wnt surrogate molecules disclosed herein typically form a substantially homogeneous aqueous solution at concentrations of at least 25 μM and higher, e.g., at least 25 μM, 40 μM, or 50 μM, usually at least 60 μM, 70 μM, 80 μM, or 90 μM, sometimes as much as 100 μM, 120 μM, or 150 μM. In other words, Wnt surrogate molecules disclosed herein typically form a substantially homogeneous aqueous solution at concentrations of about 0.1 mg/ml, about 0.5 mg/ml, of about 1 mg/ml or more.

[0187] An antigen or epitope that “specifically binds” or “preferentially binds” (used interchangeably herein) to an antibody or antigen-binding fragment thereof is a term well understood in the art, and methods to determine such specific or preferential binding are also well known in the art. A molecule, e.g., a Wnt surrogate molecule, is said to exhibit “specific binding” or “preferential binding” if it reacts or associates more frequently, more rapidly, with greater duration and/or with greater affinity with a particular cell or substance than it does with alternative cells or substances. A molecule or binding region thereof, e.g., a Wnt surrogate molecule or binding region thereof, “specifically binds” or “preferentially binds” to a target antigen, e.g., an Fzd receptor, if it binds with greater affinity, avidity, more readily, and/or with greater duration than it binds to other substances. For example, a Wnt surrogate molecule or binding region thereof that specifically or preferentially binds to the Fzd1 receptor is an antibody that binds to the Fzd1 receptor with greater affinity, avidity, more readily, and/or with greater duration than it binds to other Fzd receptors or non-Fzd proteins. It is also understood by reading this definition that, for example, a Wnt surrogate molecule or binding region thereof that specifically or preferentially binds to a first target may or may not specifically or preferentially bind to a second target. As such, “specific binding” or “preferential binding” does not necessarily require (although it can include) exclusive binding. Generally, but not necessarily, reference to binding means preferential binding.

[0188] In some embodiments, any of the one or more Fzd binding regions of a Wnt surrogate molecule binds to one, two, three, four, five or more different frizzled receptors, e.g., one or more of human frizzled receptors Fzd1, Fzd2, Fzd3, Fzd4, Fzd5, Fzd6, Fzd7, Fzd8, Fzd9, Fzd10. In some embodiments, any of the Fzd binding regions binds to Fzd1, Fzd2, Fzd5, Fzd7 and Fzd8. In various embodiments, any of the Fzd binding regions binds to: (i) Fzd1, Fzd2, Fzd7 and Fzd9; (ii) Fzd1, Fzd2 and Fzd7; (iii) Fzd5 and Fzd8; (iv) Fzd5, Fzd7 and Fzd8; (v) Fzd1, Fzd4, Fzd5 and Fzd8; (vi) Fzd1, Fzd2, Fzd5, Fzd7 and Fzd8; (vii) Fzd4 and Fzd9; (viii) Fzd9 and Fzd10; (ix) Fzd5, Fzd8 and Fzd10; (x) Fzd4, Fzd5 and Fzd8; or (xi) Fzd1, Fzd5, Fzd7 and Fzd8.

[0189] In some embodiments, the Fzd binding region is selective for one or more Fzd receptors of interest, e.g. having a specificity for the one or more desired Fzd receptors of at least 10-fold, 25-fold, 50-fold, 100-fold, 200-fold or more relative to other Fzd receptors. In some embodiments, any of the one or more Fzd binding regions of a Wnt surrogate molecule is multispecific and binds or specifically binds to a plurality of Fzd receptors, e.g., two or more of Fzd1, Fzd2, Fzd3, Fzd4, Fzd5, Fzd6, Fzd7, Fzd8, Fzd9, or Fzd10. For example, any of the one or more Fzd binding regions may be bispecific, trispecific, tetraspecific, and so on. In some embodiments, any of the one or more Fzd binding regions of a Wnt surrogate molecule is monospecific and binds or specifically binds to a single Fzd receptor, e.g., only one of Fzd1, Fzd2, Fzd3, Fzd4, Fzd5, Fzd6, Fzd7, Fzd8, Fzd9, or Fzd10.

[0190] In some embodiments, a monospecific Fzd binding region binds to a region of an Fzd receptor that does not include the cysteine rich domain (CRD) of the Fzd receptor, or includes less than the entire CRD of the FZD receptor. As illustrated in FIG. 2A, sequences within the CRD show strong homology between the 10 Fzd receptors, with homologies being even higher between subfamily members. Accordingly, certain embodiments of the monospecific Fzd binding regions disclosed herein do not bind to the CRD, or bind only to a subset of the CRD.

[0191] In some embodiments, a Fzd binding region, e.g., a monospecific Fzd binding region, binds to an epitope comprising at least a portion of the extracellular domain after the CRD, referred to herein as the “hinge region” of a Fzd receptor (see FIG. 2A). In particular embodiments, at least 20%, at least 30%, at least 40%, at least 50%, at least 60%, at least 70%, at least 80%, at least 90%, or 100% of the epitope is present within the hinge region of a Fzd receptor. As illustrated in FIGS. 4A-4E, the hinge regions of the extracellular domain of Fzd receptors show highly divergent sequences. Sequences of illustrative Fzd receptor hinge regions are set forth in SEQ ID NOs:98-107 and in Table 3 below. In certain embodiments, the hinge region includes an amino acid sequence having at least 90%, at least 95%, at least 98%, or at least 99% identity to any of the sequences set forth in SEQ ID NOs:98-107.

TABLE 3
Fzd hinge region sequences

| SID | | |
|---|---|---|
| NO. | Fzd | Hinge Region Sequence |
| 98 | Fzd1 | CVGQNTSDKGTPTPSLLPEFVVTSNPQHGGGGHRGGFPGGA |
| | | GASERGKFSC |
| 99 | Fzd2 | CVGQNHSEDGAPALLTTAPPPGLQPGAGGTPGGPGGGGAP |
| | | PRYATLEHPFHC |
| 100 | Fzd3 | CDEPYPRLVDLNLAGEPTEGAPVAVQRDYGFWC |
| 101 | Fzd4 | CMEGPGDEEVPLPHKTPIQPGEEC |
| 102 | Fzd5 | CMDYNRSEATTAPPRPFPAKPTLPGPPGAPASGGEC |
| 103 | Fzd6 | CDETVPVTFDPHTEFLGPQKKTEQVQRDIGFWC |
| 104 | Fzd7 | CVGQNTSDGSGGAGGSPTAYPTAPYLPDPPFTAMSPSDGRG |
| | | RLSFPFSC |
| 105 | Fzd8 | CMDYNRTDLTTAAPSPPRRLPPPPPGEQPPSGSGHGRPPGA |
| | | RPPHRGGGRGGGGGDAAAPPARGGGGGGKARPPGGGAAP |
| | | C |
| 106 | Fzd9 | CMEAPENATAGPAEPHKGLGMLPVAPRPARPPGDLGPGAGG |
| | | SGTC |
| 107 | Fzd10 | CMEAPNNGSDEPTRGSGLFPPLFRPQRPHSAQEHPLKDGGP |
| | | GRGGC |

[0192] In some embodiments, a monospecific Fzd binding region binds to an epitope comprising at least a portion of an N-terminal region upstream of the CRD of the Fzd receptor (FIG. 2A). In particular embodiments, at least 20%, at least 30%, at least 40%, at least 50%, at least 60%, at least 70%, at least 80%, at least 90%, or 100% of the epitope is present within the N-terminal region of a Fzd receptor. The sequence of an illustrative N-terminal region is set forth in SEQ ID NO:108 and in Table 4 below. In certain embodiments, the N-terminal region includes an amino acid sequence having at least 90%, at least 95%, at least 98%, or at least 99% identity to SEQ ID NO:108.

TABLE 4
Fzd N-terminal region sequences

| SEQ | | |
|---|---|---|
| ID NO | Fzd | Hinge Region Sequence |
| 108 | Fzd1 | QAAGQGPGQGPGPGQQPPPPPQQQQSGQQYN |

[0193] In some embodiments, any of the one or more LRP5/6 binding regions of a Wnt surrogate molecule binds to one or both of LRP5/6. For convenience, the term “LRP5/6” is used to refer collectively to either or both of LRP5 and/or LRP6.

[0194] Immunological binding generally refers to the non-covalent interactions of the type which occur between an immunoglobulin molecule and an antigen for which the immunoglobulin is specific, for example by way of illustration and not limitation, as a result of electrostatic, ionic, hydrophilic and/or hydrophobic attractions or repulsion, steric forces, hydrogen bonding, van der Waals forces, and other interactions. The strength, or affinity of immunological binding interactions can be expressed in terms of the dissociation constant (K_{d}) of the interaction, wherein a smaller K_{d} represents a greater affinity. Immunological binding properties of selected polypeptides can be quantified using methods well known in the art. One such method entails measuring the rates of antigen-binding site/antigen complex formation and dissociation, wherein those rates depend on the concentrations of the complex partners, the affinity of the interaction, and on geometric parameters that equally influence the rate in both directions. Thus, both the “on rate constant” (Kₒₙ) and the “off rate constant” (K_{off}) can be determined by calculation of the concentrations and the actual rates of association and dissociation. The ratio of K_{off}/Kₒₙ enables cancellation of all parameters not related to affinity, and is thus equal to the dissociation constant K_{d}. See, generally, Davies et al. (1990) Annual Rev. Biochem. 59:439-473.

[0195] In certain embodiments, the Wnt surrogate molecules or binding regions thereof described herein have an affinity of less than about 10,000, less than about 1000, less than about 100, less than about 10, less than about 1, less than about 0.1, less than about 0.01, less than about 0.001, less than about 0.0001, less than about 0.00001, or less than about 0.000001 nM, and in some embodiments, the antibodies may have even higher affinity for one or more Fzd receptor epitopes or LRP5 or LRP6 receptor.

[0196] The constant regions of immunoglobulins show less sequence diversity than the variable regions, and are responsible for binding a number of natural proteins to elicit important biochemical events. In humans, there are five different classes of antibodies including IgA (which includes subclasses IgA1 and IgA2), IgD, IgE, IgG (which includes subclasses IgG1, IgG2, IgG3, and IgG4), and IgM. The distinguishing features between these antibody classes are their constant regions, although subtler differences may exist in the V region.

[0197] The Fc region of an antibody interacts with a number of Fc receptors and ligands, imparting an array of important functional capabilities referred to as effector functions. For IgG, the Fc region comprises Ig domains CH2 and CH3 and the N-terminal hinge leading into CH2. An important family of Fc receptors for the IgG class are the Fc gamma receptors (FcγRs). These receptors mediate communication between antibodies and the cellular arm of the immune system (Raghavan et al., 1996, Annu Rev Cell Dev Biol 12:181-220; Ravetch et al., 2001, Annu Rev Immunol 19:275-290). In humans this protein family includes FcγRI (CD64), including isoforms FcγRIa, FcγRIb, and FcγRIc; FcγRII (CD32), including isoforms FcγRIIa (including allotypes H131 and R131), FcγRIIb (including FcγRIIb-1 and FcγRIIb-2), and FcγRIIc; and FcγRIII (CD16), including isoforms FcγRIIIa (including allotypes V158 and F158) and FcγRIIIb (including allotypes FcγRIIIb-NA1 and FcγRIIIb-NA2) (Jefferis et al., 2002, Immunol Lett 82:57-65). These receptors typically have an extracellular domain that mediates binding to Fc, a membrane spanning region, and an intracellular domain that may mediate some signaling event within the cell. These receptors are expressed in a variety of immune cells including monocytes, macrophages, neutrophils, dendritic cells, eosinophils, mast cells, platelets, B cells, large granular lymphocytes, Langerhans' cells, natural killer (NK) cells, and T cells. Formation of the Fc/FcγR complex recruits these effector cells to sites of bound antigen, typically resulting in signaling events within the cells and important subsequent immune responses such as release of inflammation mediators, B cell activation, endocytosis, phagocytosis, and cytotoxic attack.

[0198] The ability to mediate cytotoxic and phagocytic effector functions is a potential mechanism by which antibodies destroy targeted cells. The cell-mediated reaction wherein nonspecific cytotoxic cells that express FcγRs recognize bound antibody on a target cell and subsequently cause lysis of the target cell is referred to as antibody dependent cell-mediated cytotoxicity (ADCC) (Raghavan et al., 1996, Annu Rev Cell Dev Biol 12:181-220; Ghetie et al., 2000, Annu Rev Immunol 18:739-766; Ravetch et al., 2001, Annu Rev Immunol 19:275-290). The cell-mediated reaction wherein nonspecific cytotoxic cells that express FcγRs recognize bound antibody on a target cell and subsequently cause phagocytosis of the target cell is referred to as antibody dependent cell-mediated phagocytosis (ADCP). All FcγRs bind the same region on Fc, at the N-terminal end of the Cg2 (CH2) domain and the preceding hinge. This interaction is well characterized structurally (Sondermann et al., 2001, J Mol Biol 309:737-749), and several structures of the human Fc bound to the extracellular domain of human FcγRIIIb have been solved (pdb accession code 1E4K) (Sondermann et al., 2000, Nature 406:267-273.) (pdb accession codes 1IIS and 1IIX) (Radaev et al., 2001, J Biol Chem 276:16469-16477.)

[0199] The different IgG subclasses have different affinities for the FcγRs, with IgG1 and IgG3 typically binding substantially better to the receptors than IgG2 and IgG4 (Jefferis et al., 2002, Immunol Lett 82:57-65). All FcγRs bind the same region on IgG Fc, yet with different affinities: the high affinity binder FcγRI has a K_{d} for IgG1 of 10⁻⁸ M⁻¹, whereas the low affinity receptors FcγRII and FcγRIII generally bind at 10⁻⁶ and 10⁻⁵ respectively. The extracellular domains of FcγRIIIa and FcγRIIIb are 96% identical; however, FcγRIIIb does not have an intracellular signaling domain. Furthermore, whereas FcγRI, FcγRIIa/c, and FcγRIIIa are positive regulators of immune complex-triggered activation, characterized by having an intracellular domain that has an immunoreceptor tyrosine-based activation motif (ITAM), FcγRIIb has an immunoreceptor tyrosine-based inhibition motif (ITIM) and is therefore inhibitory. Thus the former are referred to as activation receptors, and FcγRIIb is referred to as an inhibitory receptor. The receptors also differ in expression pattern and levels on different immune cells. Yet another level of complexity is the existence of a number of FcγR polymorphisms in the human proteome. A particularly relevant polymorphism with clinical significance is V158/F158 FcγRIIIa. Human IgG1 binds with greater affinity to the V158 allotype than to the F158 allotype. This difference in affinity, and presumably its effect on ADCC and/or ADCP, has been shown to be a significant determinant of the efficacy of the anti-CD20 antibody rituximab (Rituxan®, a registered trademark of IDEC Pharmaceuticals Corporation). Subjects with the V158 allotype respond favorably to rituximab treatment; however, subjects with the lower affinity F158 allotype respond poorly (Cartron et al., 2002, Blood 99:754-758). Approximately 10-20% of humans are V158/V158 homozygous, 45% are V158/F158 heterozygous, and 35-45% of humans are F158/F158 homozygous (Lehrnbecher et al., 1999, Blood 94:4220-4232; Cartron et al., 2002, Blood 99:754-758). Thus 80-90% of humans are poor responders, that is, they have at least one allele of the F158 FcγRIIIa.

[0200] The Fc region is also involved in activation of the complement cascade. In the classical complement pathway, C1 binds with its C1q subunits to Fc fragments of IgG or IgM, which has formed a complex with antigen(s). In certain embodiments of the present disclosure, modifications to the Fc region comprise modifications that alter (either enhance or decrease) the ability of a Fzd-specific antibody as described herein to activate the complement system (see e.g., U.S. Pat. No. 7,740,847). To assess complement activation, a complement-dependent cytotoxicity (CDC) assay may be performed (See, e.g., Gazzano-Santoro et al., J. Immunol. Methods, 202:163 (1996)).

[0201] Thus in certain embodiments, the present disclosure provides anti-Fzd antibodies having a modified Fc region with altered functional properties, such as reduced or enhanced CDC, ADCC, or ADCP activity, or enhanced binding affinity for a specific FcγR or increased serum half-life. Other modified Fc regions contemplated herein are described, for example, in issued U.S. Pat. Nos. 7,317,091; 7,657,380; 7,662,925; 6,538,124; 6,528,624; 7,297,775; 7,364,731; published U.S. Application Nos. US2009092599; US20080131435; US20080138344; and published International Application Nos. WO2006/105338; WO2004/063351; WO2006/088494; WO2007/024249.

[0202] In certain embodiments, Wnt surrogate molecules comprise antibody variable domains with the desired binding specificities fused to immunoglobulin constant domain sequences. In certain embodiments, the fusion is with an Ig heavy chain constant domain, comprising at least part of the hinge, CH2, and CH3 regions. In particular embodiments, the first heavy-chain constant region (CH1) containing the site necessary for light chain bonding, present in at least one of the fusions. DNAs encoding the immunoglobulin heavy chain fusions and, if desired, the immunoglobulin light chain, are inserted into separate expression vectors, and are co-transfected into a suitable host cell. This provides for greater flexibility in adjusting the mutual proportions of the three polypeptide fragments in embodiments when unequal ratios of the three polypeptide chains used in the construction provide the optimum yield of the desired bispecific antibody. It is, however, possible to insert the coding sequences for two or all three polypeptide chains into a single expression vector when the expression of at least two polypeptide chains in equal ratios results in high yields or when the ratios have no significant effect on the yield of the desired chain combination.

[0203] Wnt surrogate molecules disclosed herein may also be modified to include an epitope tag or label, e.g., for use in purification or diagnostic applications. There are many linking groups known in the art for making antibody conjugates, including, for example, those disclosed in U.S. Pat. No. 5,208,020 or EP Patent 0 425 235 B1, and Chari et al., Cancer Research 52: 127-131 (1992). The linking groups include disulfide groups, thioether groups, acid labile groups, photolabile groups, peptidase labile groups, or esterase labile groups, as disclosed in the above-identified patents, disulfide and thioether groups being preferred.

[0204] In certain embodiments, anti-LRP5/6 antibodies and antigen-binding fragments thereof and/or anti-Fzd antibodies and antigen-binding fragments thereof present within a Wnt surrogate molecule are monoclonal. In certain embodiments, they are humanized.

[0205] The present disclosure further provides in certain embodiments an isolated nucleic acid encoding a polypeptide present in a Wnt surrogate molecule disclosed herein. Nucleic acids include DNA and RNA. These and related embodiments may include polynucleotides encoding antibody fragments that bind one or more Fzd receptors and/or LRP5 or LRP6 as described herein. The term “isolated polynucleotide” as used herein shall mean a polynucleotide of genomic, cDNA, or synthetic origin, or some combination thereof, which by virtue of its origin, the isolated polynucleotide: (1) is not associated with all or a portion of a polynucleotide in which the isolated polynucleotide is found in nature; (2) is linked to a polynucleotide to which it is not linked in nature, or (3) does not occur in nature as part of a larger sequence. An isolated polynucleotide may include naturally occurring and/or artificial sequences.

[0206] The term “operably linked” means that the components to which the term is applied are in a relationship that allows them to carry out their inherent functions under suitable conditions. For example, a transcription control sequence “operably linked” to a protein coding sequence is ligated thereto so that expression of the protein coding sequence is achieved under conditions compatible with the transcriptional activity of the control sequences.

[0207] The term “control sequence” as used herein refers to polynucleotide sequences that can affect expression, processing or intracellular localization of coding sequences to which they are ligated or operably linked. The nature of such control sequences may depend upon the host organism. In particular embodiments, transcription control sequences for prokaryotes may include a promoter, ribosomal binding site, and transcription termination sequence. In other particular embodiments, transcription control sequences for eukaryotes may include promoters comprising one or a plurality of recognition sites for transcription factors, transcription enhancer sequences, transcription termination sequences and polyadenylation sequences. In certain embodiments, “control sequences” can include leader sequences and/or fusion partner sequences.

[0208] The term “polynucleotide” as referred to herein means single-stranded or double-stranded nucleic acid polymers. In certain embodiments, the nucleotides comprising the polynucleotide can be ribonucleotides or deoxyribonucleotides or a modified form of either type of nucleotide. Said modifications include base modifications such as bromouridine, ribose modifications such as arabinoside and 2′,3′-dideoxyribose and internucleotide linkage modifications such as phosphorothioate, phosphorodithioate, phosphoroselenoate, phosphorodiselenoate, phosphoroanilothioate, phoshoraniladate and phosphoroamidate. The term “polynucleotide” specifically includes single and double stranded forms of DNA.

[0209] The term “naturally occurring nucleotides” includes deoxyribonucleotides and ribonucleotides. The term “modified nucleotides” includes nucleotides with modified or substituted sugar groups and the like. The term “oligonucleotide linkages” includes oligonucleotide linkages such as phosphorothioate, phosphorodithioate, phosphoroselenoate, phosphorodiselenoate, phosphoroanilothioate, phoshoraniladate, phosphoroamidate, and the like. See, e.g., LaPlanche et al., 1986, Nucl. Acids Res., 14:9081; Stec et al., 1984, J. Am. Chem. Soc., 106:6077; Stein et al., 1988, Nucl. Acids Res., 16:3209; Zon et al., 1991, Anti-Cancer Drug Design, 6:539; Zon et al., 1991, OLIGONUCLEOTIDES AND ANALOGUES: A PRACTICAL APPROACH, pp. 87-108 (F. Eckstein, Ed.), Oxford University Press, Oxford England; Stec et al., U.S. Pat. No. 5,151,510; Uhlmann and Peyman, 1990, Chemical Reviews, 90:543, the disclosures of which are hereby incorporated by reference for any purpose. An oligonucleotide can include a detectable label to enable detection of the oligonucleotide or hybridization thereof.

[0210] The term “vector” is used to refer to any molecule (e.g., nucleic acid, plasmid, or virus) used to transfer coding information to a host cell. The term “expression vector” refers to a vector that is suitable for transformation of a host cell and contains nucleic acid sequences that direct and/or control expression of inserted heterologous nucleic acid sequences. Expression includes, but is not limited to, processes such as transcription, translation, and RNA splicing, if introns are present.

[0211] As will be understood by those skilled in the art, polynucleotides may include genomic sequences, extra-genomic and plasm id-encoded sequences and smaller engineered gene segments that express, or may be adapted to express, proteins, polypeptides, peptides and the like. Such segments may be naturally isolated, or modified synthetically by the skilled person.

[0212] As will be also recognized by the skilled artisan, polynucleotides may be single-stranded (coding or antisense) or double-stranded, and may be DNA (genomic, cDNA or synthetic) or RNA molecules. RNA molecules may include HnRNA molecules, which contain introns and correspond to a DNA molecule in a one-to-one manner, and mRNA molecules, which do not contain introns. Additional coding or non-coding sequences may, but need not, be present within a polynucleotide according to the present disclosure, and a polynucleotide may, but need not, be linked to other molecules and/or support materials. Polynucleotides may comprise a native sequence or may comprise a sequence that encodes a variant or derivative of such a sequence.

[0213] It will be appreciated by those of ordinary skill in the art that, as a result of the degeneracy of the genetic code, there are many nucleotide sequences that encodes an antibody as described herein. Some of these polynucleotides bear minimal sequence identity to the nucleotide sequence of the native or original polynucleotide sequence encoding a polypeptide within a Wnt surrogate molecule. Nonetheless, polynucleotides that vary due to differences in codon usage are expressly contemplated by the present disclosure. In certain embodiments, sequences that have been codon-optimized for mammalian expression are specifically contemplated.

[0214] Therefore, in another embodiment of the present disclosure, a mutagenesis approach, such as site-specific mutagenesis, may be employed for the preparation of variants and/or derivatives of the polypeptides described herein. By this approach, specific modifications in a polypeptide sequence can be made through mutagenesis of the underlying polynucleotides that encode them. These techniques provide a straightforward approach to prepare and test sequence variants, for example, incorporating one or more of the foregoing considerations, by introducing one or more nucleotide sequence changes into the polynucleotide.

[0215] Site-specific mutagenesis allows the production of mutants through the use of specific oligonucleotide sequences which encode the DNA sequence of the desired mutation, as well as a sufficient number of adjacent nucleotides, to provide a primer sequence of sufficient size and sequence complexity to form a stable duplex on both sides of the deletion junction being traversed. Mutations may be employed in a selected polynucleotide sequence to improve, alter, decrease, modify, or otherwise change the properties of the polynucleotide itself, and/or alter the properties, activity, composition, stability, or primary sequence of the encoded polypeptide.

[0216] In certain embodiments, the inventors contemplate the mutagenesis of the polynucleotide sequences that encode a polypeptide present in a Wnt surrogate molecule, to alter one or more properties of the encoded polypeptide, such as the binding affinity, or the function of a particular Fc region, or the affinity of the Fc region for a particular FcγR. The techniques of site-specific mutagenesis are well-known in the art, and are widely used to create variants of both polypeptides and polynucleotides. For example, site-specific mutagenesis is often used to alter a specific portion of a DNA molecule. In such embodiments, a primer comprising typically about 14 to about 25 nucleotides or so in length is employed, with about 5 to about 10 residues on both sides of the junction of the sequence being altered.

[0217] As will be appreciated by those of skill in the art, site-specific mutagenesis techniques have often employed a phage vector that exists in both a single stranded and double stranded form. Typical vectors useful in site-directed mutagenesis include vectors such as the M13 phage. These phages are readily commercially-available and their use is generally well-known to those skilled in the art. Double-stranded plasm ids are also routinely employed in site directed mutagenesis that eliminates the step of transferring the gene of interest from a plasmid to a phage.

[0218] The preparation of sequence variants of the selected peptide-encoding DNA segments using site-directed mutagenesis provides a means of producing potentially useful species and is not meant to be limiting as there are other ways in which sequence variants of peptides and the DNA sequences encoding them may be obtained. For example, recombinant vectors encoding the desired peptide sequence may be treated with mutagenic agents, such as hydroxylamine, to obtain sequence variants. Specific details regarding these methods and protocols are found in the teachings of Maloy et al., 1994; Segal, 1976; Prokop and Bajpai, 1991; Kuby, 1994; and Maniatis et al., 1982, each incorporated herein by reference, for that purpose.

[0219] In many embodiments, one or more nucleic acids encoding a polypeptide of a Wnt surrogate molecule are introduced directly into a host cell, and the cell incubated under conditions sufficient to induce expression of the encoded polypeptides. The Wnt surrogate polypeptides of this disclosure may be prepared using standard techniques well known to those of skill in the art in combination with the polypeptide and nucleic acid sequences provided herein. The polypeptide sequences may be used to determine appropriate nucleic acid sequences encoding the particular polypeptide disclosed thereby. The nucleic acid sequence may be optimized to reflect particular codon “preferences” for various expression systems according to standard methods well known to those of skill in the art.

[0220] According to certain related embodiments there is provided a recombinant host cell which comprises one or more constructs as described herein, e.g., a vector comprising a nucleic acid encoding a Wnt surrogate molecule or polypeptide thereof; and a method of production of the encoded product, which method comprises expression from encoding nucleic acid therefor. Expression may conveniently be achieved by culturing under appropriate conditions recombinant host cells containing the nucleic acid. Following production by expression, an antibody or antigen-binding fragment thereof, may be isolated and/or purified using any suitable technique, and then used as desired.

[0221] Polypeptides, and encoding nucleic acid molecules and vectors, may be isolated and/or purified, e.g., from their natural environment, in substantially pure or homogeneous form, or, in the case of nucleic acid, free or substantially free of nucleic acid or genes of origin other than the sequence encoding a polypeptide with the desired function. Nucleic acid may comprise DNA or RNA and may be wholly or partially synthetic. Reference to a nucleotide sequence as set out herein encompasses a DNA molecule with the specified sequence, and encompasses a RNA molecule with the specified sequence in which U is substituted for T, unless context requires otherwise.

[0222] Systems for cloning and expression of a polypeptide in a variety of different host cells are well known. Suitable host cells include bacteria, mammalian cells, yeast and baculovirus systems. Mammalian cell lines available in the art for expression of a heterologous polypeptide include Chinese hamster ovary cells, HeLa cells, baby hamster kidney cells, NSO mouse melanoma cells and many others. A common, preferred bacterial host is E. coli.

[0223] The expression of polypeptides, e.g., antibodies and antigen-binding fragments thereof, in prokaryotic cells such as E. coli is well established in the art. For a review, see for example Pluckthun, A. Bio/Technology 9: 545-551 (1991). Expression in eukaryotic cells in culture is also available to those skilled in the art as an option for production of antibodies or antigen-binding fragments thereof, see recent reviews, for example Ref, M. E. (1993) Curr. Opinion Biotech. 4: 573-576; Trill J. J. et al. (1995) Curr. Opinion Biotech 6: 553-560.

[0224] Suitable vectors can be chosen or constructed, containing appropriate regulatory sequences, including promoter sequences, terminator sequences, polyadenylation sequences, enhancer sequences, marker genes and other sequences as appropriate. Vectors may be plasmids, viral, e.g., phage, or phagemid, as appropriate. For further details see, for example, Molecular Cloning: a Laboratory Manual: 2nd edition, Sambrook et al., 1989, Cold Spring Harbor Laboratory Press. Many known techniques and protocols for manipulation of nucleic acid, for example in preparation of nucleic acid constructs, mutagenesis, sequencing, introduction of DNA into cells and gene expression, and analysis of proteins, are described in detail in Current Protocols in Molecular Biology, Second Edition, Ausubel et al. eds., John Wiley & Sons, 1992, or subsequent updates thereto.

[0225] The term “host cell” is used to refer to a cell into which has been introduced, or which is capable of having introduced into it, a nucleic acid sequence encoding one or more of the herein described polypeptides, and which further expresses or is capable of expressing a selected gene of interest, such as a gene encoding any herein described polypeptide. The term includes the progeny of the parent cell, whether or not the progeny are identical in morphology or in genetic make-up to the original parent, so long as the selected gene is present. Accordingly there is also contemplated a method comprising introducing such nucleic acid into a host cell. The introduction may employ any available technique. For eukaryotic cells, suitable techniques may include calcium phosphate transfection, DEAE-Dextran, electroporation, liposome-mediated transfection and transduction using retrovirus or other virus, e.g. vaccinia or, for insect cells, baculovirus. For bacterial cells, suitable techniques may include calcium chloride transformation, electroporation and transfection using bacteriophage. The introduction may be followed by causing or allowing expression from the nucleic acid, e.g. by culturing host cells under conditions for expression of the gene. In one embodiment, the nucleic acid is integrated into the genome (e.g., chromosome) of the host cell. Integration may be promoted by inclusion of sequences which promote recombination with the genome, in accordance-with standard techniques.

[0226] The present disclosure also provides, in certain embodiments, a method which comprises using a construct as stated above in an expression system in order to express a particular polypeptide such as a Wnt mimetic molecule as described herein. The term “transduction” is used to refer to the transfer of genes from one bacterium to another, usually by a phage. “Transduction” also refers to the acquisition and transfer of eukaryotic cellular sequences by retroviruses. The term “transfection” is used to refer to the uptake of foreign or exogenous DNA by a cell, and a cell has been “transfected” when the exogenous DNA has been introduced inside the cell membrane. A number of transfection techniques are well known in the art and are disclosed herein. See, e.g., Graham et al., 1973, Virology 52:456; Sambrook et al., 2001, MOLECULAR CLONING, A LABORATORY MANUAL, Cold Spring Harbor Laboratories; Davis et al., 1986, BASIC METHODS IN MOLECULAR BIOLOGY, Elsevier; and Chu et al., 1981, Gene 13:197. Such techniques can be used to introduce one or more exogenous DNA moieties into suitable host cells.

[0227] The term “transformation” as used herein refers to a change in a cell's genetic characteristics, and a cell has been transformed when it has been modified to contain a new DNA. For example, a cell is transformed where it is genetically modified from its native state. Following transfection or transduction, the transforming DNA may recombine with that of the cell by physically integrating into a chromosome of the cell, or may be maintained transiently as an episomal element without being replicated, or may replicate independently as a plasmid. A cell is considered to have been stably transformed when the DNA is replicated with the division of the cell. The term “naturally occurring” or “native” when used in connection with biological materials such as nucleic acid molecules, polypeptides, host cells, and the like, refers to materials which are found in nature and are not manipulated by a human. Similarly, “non-naturally occurring” or “non-native” as used herein refers to a material that is not found in nature or that has been structurally modified or synthesized by a human.

[0228] The terms “polypeptide” “protein” and “peptide” and “glycoprotein” are used interchangeably and mean a polymer of amino acids not limited to any particular length. The term does not exclude modifications such as myristylation, sulfation, glycosylation, phosphorylation and addition or deletion of signal sequences. The terms “polypeptide” or “protein” means one or more chains of amino acids, wherein each chain comprises amino acids covalently linked by peptide bonds, and wherein said polypeptide or protein can comprise a plurality of chains non-covalently and/or covalently linked together by peptide bonds, having the sequence of native proteins, that is, proteins produced by naturally-occurring and specifically non-recombinant cells, or genetically-engineered or recombinant cells, and comprise molecules having the amino acid sequence of the native protein, or molecules having deletions from, additions to, and/or substitutions of one or more amino acids of the native sequence. The terms “polypeptide” and “protein” specifically encompass Wnt surrogate molecules, Fzd binding regions thereof, LRP5/6 binding regions thereof, antibodies and antigen-binding fragments thereof that bind to a Fzd receptor or a LRP5 or LRP6 receptor disclosed herein, or sequences that have deletions from, additions to, and/or substitutions of one or more amino acid of any of these polypeptides. Thus, a “polypeptide” or a “protein” can comprise one (termed “a monomer”) or a plurality (termed “a multimer”) of amino acid chains.

[0229] The term “isolated protein,” “isolated Wnt surrogate molecule or “isolated antibody” referred to herein means that a subject protein, Wnt surrogate molecule, or antibody: (1) is free of at least some other proteins with which it would typically be found in nature; (2) is essentially free of other proteins from the same source, e.g., from the same species, (3) is expressed by a cell from a different species; (4) has been separated from at least about 50 percent of polynucleotides, lipids, carbohydrates, or other materials with which it is associated in nature; (5) is not associated (by covalent or noncovalent interaction) with portions of a protein with which the “isolated protein” is associated in nature; (6) is operably associated (by covalent or noncovalent interaction) with a polypeptide with which it is not associated in nature; or (7) does not occur in nature. Such an isolated protein can be encoded by genomic DNA, cDNA, mRNA or other RNA, or may be of synthetic origin, or any combination thereof. In certain embodiments, an isolated protein may comprise naturally-occurring and/or artificial polypeptide sequences. In certain embodiments, the isolated protein is substantially free from proteins or polypeptides or other contaminants that are found in its natural environment that would interfere with its use (therapeutic, diagnostic, prophylactic, research or otherwise).

[0230] Amino acid sequence modification(s) of any of the polypeptides (e.g., Wnt surrogate molecules or Fzd binding regions or LRP5/6 binding regions thereof) described herein are contemplated. For example, it may be desirable to improve the binding affinity and/or other biological properties of the Wnt surrogate molecule. For example, amino acid sequence variants of a Wnt surrogate molecule may be prepared by introducing appropriate nucleotide changes into a polynucleotide that encodes the antibody, or a chain thereof, or by peptide synthesis. Such modifications include, for example, deletions from, and/or insertions into and/or substitutions of, residues within the amino acid sequences of the antibody. Any combination of deletion, insertion, and substitution may be made to arrive at the final Wnt surrogate molecule, provided that the final construct possesses the desired characteristics (e.g., high affinity binding to one or more Fzd and/or LRP5/6 receptor). The amino acid changes also may alter post-translational processes of the antibody, such as changing the number or position of glycosylation sites. Any of the variations and modifications described above for polypeptides of the present disclosure may be included in antibodies of the present disclosure.

[0231] The present disclosure provides variants of any of the polypeptides (e.g., Wnt surrogate molecules or Fzd binding regions or LRP5/6 binding regions thereof, or antibodies or antigen-binding fragments thereof) disclosed herein. In certain embodiments, a variant has at least 90%, at least 95%, at least 98%, or at least 99% identity to a polypeptide disclosed herein. In certain embodiments, such variant polypeptides bind to one or more Fzd receptor, and/or to one or more LRP5/6 receptor, at least about 50%, at least about 70%, and in certain embodiments, at least about 90% as well as a Wnt surrogate molecule specifically set forth herein. In further embodiments, such variant Wnt surrogate molecules bind to one or more Fzd receptor, and/or to one or more LRP5/6 receptor, with greater affinity than the Wnt surrogate molecules set forth herein, for example, that bind quantitatively at least about 105%, 106%, 107%, 108%, 109%, or 110% as well as an antibody sequence specifically set forth herein.

[0232] In particular embodiments, the Wnt surrogate molecule or a binding region thereof, e.g., a Fab, scFv, or VHH or sdAb may comprise: a) a heavy chain variable region comprising: i. a CDR1 region that is identical in amino acid sequence to the heavy chain CDR1 region of a selected antibody described herein; ii. a CDR2 region that is identical in amino acid sequence to the heavy chain CDR2 region of the selected antibody; and iii. a CDR3 region that is identical in amino acid sequence to the heavy chain CDR3 region of the selected antibody; and/or b) a light chain variable domain comprising: i. a CDR1 region that is identical in amino acid sequence to the light chain CDR1 region of the selected antibody; ii. a CDR2 region that is identical in amino acid sequence to the light chain CDR2 region of the selected antibody; and iii. a CDR3 region that is identical in amino acid sequence to the light chain CDR3 region of the selected antibody; wherein the antibody specifically binds a selected target (e.g., one or more Fzd receptor epitopes or LRP5 or LRP6 receptors). In a further embodiment, the antibody, or antigen-binding fragment thereof, is a variant antibody or antigen-binding fragment thereof wherein the variant comprises a heavy and light chain identical to the selected antibody except for up to 8, 9, 10, 11, 12, 13, 14, 15, or more amino acid substitutions in the CDR regions of the VH and VL regions. In this regard, there may be 1, 2, 3, 4, 5, 6, 7, 8, or in certain embodiments, 9, 10, 11, 12, 13, 14, 15 more amino acid substitutions in the CDR regions of the selected antibody. Substitutions may be in CDRs either in the VH and/or the VL regions. (See, e.g., Muller, 1998, Structure 6:1153-1167).

[0233] In particular embodiments, the Wnt surrogate molecule or a binding region thereof, e.g., a Fab, scFv, or VHH or sdAb, may have: a) a heavy chain variable region having an amino acid sequence that is at least 80% identical, at least 95% identical, at least 90%, at least 95% or at least 98% or 99% identical, to the heavy chain variable region of an antibody or antigen-binding fragments thereof described herein; and/or b) a light chain variable region having an amino acid sequence that is at least 80% identical, at least 85%, at least 90%, at least 95% or at least 98% or 99% identical, to the light chain variable region of an antibody or antigen-binding fragments thereof described herein. The amino acid sequence of illustrative antigen-binding fragments thereof are set forth in SEQ ID NOs:1-97 and 109-157.

[0234] A polypeptide has a certain percent “sequence identity” to another polypeptide, meaning that, when aligned, that percentage of amino acids are the same when comparing the two sequences. Sequence similarity can be determined in a number of different manners. To determine sequence identity, sequences can be aligned using the methods and computer programs, including BLAST, available over the world wide web at ncbi.nlm.nih.gov/BLAST/. Another alignment algorithm is FASTA, available in the Genetics Computing Group (GCG) package, from Madison, Wis., USA, a wholly owned subsidiary of Oxford Molecular Group, Inc. Other techniques for alignment are described in Methods in Enzymology, vol. 266: Computer Methods for Macromolecular Sequence Analysis (1996), ed. Doolittle, Academic Press, Inc., a division of Harcourt Brace & Co., San Diego, Calif., USA. Of particular interest are alignment programs that permit gaps in the sequence. The Smith-Waterman is one type of algorithm that permits gaps in sequence alignments. See Meth. Mol. Biol. 70: 173-187 (1997). Also, the GAP program using the Needleman and Wunsch alignment method can be utilized to align sequences. See J. Mol. Biol. 48: 443-453 (1970)

[0235] Of interest is the BestFit program using the local homology algorithm of Smith and Waterman (Advances in Applied Mathematics 2: 482-489 (1981) to determine sequence identity. The gap generation penalty will generally range from 1 to 5, usually 2 to 4 and in many embodiments will be 3. The gap extension penalty will generally range from about 0.01 to 0.20 and in many instances will be 0.10. The program has default parameters determined by the sequences inputted to be compared. Preferably, the sequence identity is determined using the default parameters determined by the program. This program is available also from Genetics Computing Group (GCG) package, from Madison, Wis., USA.

[0236] Another program of interest is the FastDB algorithm. FastDB is described in Current Methods in Sequence Comparison and Analysis, Macromolecule Sequencing and Synthesis, Selected Methods and Applications, pp. 127-149, 1988, Alan R. Liss, Inc. Percent sequence identity is calculated by FastDB based upon the following parameters:

### Mismatch Penalty: 1.00; Gap Penalty: 1.00; Gap Size Penalty: 0.33; and Joining Penalty: 30.0.

[0237] In particular embodiments, the Wnt surrogate molecule or a binding region thereof, e.g., a Fab, scFv, or VHH or sdAb may comprise: a) a heavy chain variable region comprising: i. a CDR1 region that is identical in amino acid sequence to the heavy chain CDR1 region of a selected antibody described herein; ii. a CDR2 region that is identical in amino acid sequence to the heavy chain CDR2 region of the selected antibody; and iii. a CDR3 region that is identical in amino acid sequence to the heavy chain CDR3 region of the selected antibody; and b) a light chain variable domain comprising: i. a CDR1 region that is identical in amino acid sequence to the light chain CDR1 region of the selected antibody; ii. a CDR2 region that is identical in amino acid sequence to the light chain CDR2 region of the selected antibody; and iii. a CDR3 region that is identical in amino acid sequence to the light chain CDR3 region of the selected antibody; wherein the antibody specifically binds a selected target (e.g., a Fzd receptor, such as Fzd1). In a further embodiment, the antibody, or antigen-binding fragment thereof, is a variant antibody wherein the variant comprises a heavy and light chain identical to the selected antibody except for up to 8, 9, 10, 11, 12, 13, 14, 15, or more amino acid substitutions in the CDR regions of the VH and VL regions. In this regard, there may be 1, 2, 3, 4, 5, 6, 7, 8, or in certain embodiments, 9, 10, 11, 12, 13, 14, 15 more amino acid substitutions in the CDR regions of the selected antibody. Substitutions may be in CDRs either in the VH and/or the VL regions. (See, e.g., Muller, 1998, Structure 6:1153-1167).

[0238] Determination of the three-dimensional structures of representative polypeptides (e.g., variant Fzd binding regions or LRP5/6 binding regions of Wnt surrogate molecules as provided herein) may be made through routine methodologies such that substitution, addition, deletion or insertion of one or more amino acids with selected natural or non-natural amino acids can be virtually modeled for purposes of determining whether a so derived structural variant retains the space-filling properties of presently disclosed species. See, for instance, Donate et al., 1994 Prot. Sci. 3:2378; Bradley et al., Science 309: 1868-1871 (2005); Schueler-Furman et al., Science 310:638 (2005); Dietz et al., Proc. Nat. Acad. Sci. USA 103:1244 (2006); Dodson et al., Nature 450:176 (2007); Qian et al., Nature 450:259 (2007); Raman et al. Science 327:1014-1018 (2010). Some additional non-limiting examples of computer algorithms that may be used for these and related embodiments, such as for rational design of binding regions include VMD which is a molecular visualization program for displaying, animating, and analyzing large biomolecular systems using 3-D graphics and built-in scripting (see the website for the Theoretical and Computational Biophysics Group, University of Illinois at Urbana-Champagne, at ks.uiuc.edu/Research/vmd/. Many other computer programs are known in the art and available to the skilled person and which allow for determining atomic dimensions from space-filling models (van der Waals radii) of energy-minimized conformations; GRID, which seeks to determine regions of high affinity for different chemical groups, thereby enhancing binding, Monte Carlo searches, which calculate mathematical alignment, and CHARMM (Brooks et al. (1983) J. Comput. Chem. 4:187-217) and AMBER (Weiner et al (1981) J. Comput. Chem. 106: 765), which assess force field calculations, and analysis (see also, Eisenfield et al. (1991) Am. J. Physiol. 261:C376-386; Lybrand (1991) J. Pharm. Belg. 46:49-54; Froimowitz (1990) Biotechniques 8:640-644; Burbam et al. (1990) Proteins 7:99-111; Pedersen (1985) Environ. Health Perspect. 61:185-190; and Kini et al. (1991) J. Biomol. Struct. Dyn. 9:475-488). A variety of appropriate computational computer programs are also commercially available, such as from Schrödinger (Munich, Germany).

### Compositions

[0239] Pharmaceutical compositions comprising a Wnt surrogate molecule described herein and one or more pharmaceutically acceptable diluent, carrier, or excipient are also disclosed. In particular embodiments, the pharmaceutical composition further comprises one or more Wnt polypeptides or Norrin polypeptides.

[0240] In further embodiments, pharmaceutical compositions comprising a polynucleotide comprising a nucleic acid sequence encoding a Wnt surrogate molecule described herein and one or more pharmaceutically acceptable diluent, carrier, or excipient are also disclosed. In particular embodiments, the pharmaceutical composition further comprises one or more polynucleotides comprising a nucleic acid sequence encoding a Wnt polypeptide or Norrin polypeptide. In certain embodiments, the polynucleotides are DNA or mRNA, e.g., a modified mRNA. In particular embodiments, the polynucleotides are modified mRNAs further comprising a 5′ cap sequence and/or a 3′ tailing sequence, e.g., a polyA tail. In other embodiments, the polynucleotides are expression cassettes comprising a promoter operatively linked to the coding sequences. In certain embodiments, the nucleic acid sequence encoding the Wnt surrogate molecule and the nucleic acid sequence encoding the Wnt polypeptide or Norrin polypeptide are present in the same polynucleotide.

[0241] In further embodiments, pharmaceutical compositions comprising an expression vector, e.g., a viral vector, comprising a polynucleotide comprising a nucleic acid sequence encoding a Wnt surrogate molecule described herein and one or more pharmaceutically acceptable diluent, carrier, or excipient are also disclosed. In particular embodiments, the pharmaceutical composition further comprises an expression vector, e.g., a viral vector, comprising a polynucleotide comprising a nucleic acid sequence encoding a Wnt polypeptide or Norrin polypeptide. In certain embodiments, the nucleic acid sequence encoding the Wnt surrogate molecule and the nucleic acid sequence encoding the Wnt polypeptide or Norrin polypeptide are present in the same polynucleotide, e.g., expression cassette.

[0242] The present disclosure further contemplates a pharmaceutical composition comprising a cell comprising an expression vector comprising a polynucleotide comprising a promoter operatively linked to a nucleic acid encoding a Wnt surrogate molecule and one or more pharmaceutically acceptable diluent, carrier, or excipient. In particular embodiments, the pharmaceutical composition further comprises a cell comprising an expression vector comprising a polynucleotide comprising a promoter operatively linked to a nucleic acid sequence encoding a Wnt polypeptide or a Norrin polypeptide. In certain embodiments, the nucleic acid sequence encoding the Wnt surrogate molecule and the nucleic acid sequence encoding the Wnt polypeptide or Norrin polypeptide are present in the same polynucleotide, e.g., expression cassette and/or in the same cell. In particular embodiments, the cell is a heterologous cell or an autologous cell obtained from the subject to be treated. In particular embodiments, the cell is a stem cell, e.g., an adipose-derived stem cell or a hematopoietic stem cell.

[0243] The present disclosure contemplates pharmaceutical compositions comprising a first molecule for delivery of a Wnt surrogate molecule as a first active agent and a second molecule for delivery of a Wnt polypeptide or Norrin polypeptide. The first and second molecule may be the same type of molecule or different types of molecules. For example, in certain embodiments, the first and second molecule may each be independently selected from the following types of molecules: polypeptides, small organic molecules, nucleic acids encoding the first or second active agent (optionally DNA or mRNA, optionally modified RNA), vectors comprising a nucleic acid sequence encoding the first or second active agent (optionally expression vectors or viral vectors), and cells comprising a nucleic acid sequence encoding the first or second active agent (optionally an expression cassette).

[0244] The subject molecules, alone or in combination, can be combined with pharmaceutically-acceptable carriers, diluents, excipients and reagents useful in preparing a formulation that is generally safe, non-toxic, and desirable, and includes excipients that are acceptable for mammalian, e.g., human or primate, use. Such excipients can be solid, liquid, semisolid, or, in the case of an aerosol composition, gaseous. Examples of such carriers, diluents and excipients include, but are not limited to, water, saline, Ringer's solutions, dextrose solution, and 5% human serum albumin. Supplementary active compounds can also be incorporated into the formulations. Solutions or suspensions used for the formulations can include a sterile diluent such as water for injection, saline solution, fixed oils, polyethylene glycols, glycerine, propylene glycol or other synthetic solvents; antibacterial compounds such as benzyl alcohol or methyl parabens; antioxidants such as ascorbic acid or sodium bisulfite; chelating compounds such as ethylenediaminetetraacetic acid (EDTA); buffers such as acetates, citrates or phosphates; detergents such as Tween 20 to prevent aggregation; and compounds for the adjustment of tonicity such as sodium chloride or dextrose. The pH can be adjusted with acids or bases, such as hydrochloric acid or sodium hydroxide. In particular embodiments, the pharmaceutical compositions are sterile.

[0245] Pharmaceutical compositions may further include sterile aqueous solutions or dispersions and sterile powders for the extemporaneous preparation of sterile injectable solutions or dispersion. For intravenous administration, suitable carriers include physiological saline, bacteriostatic water, or phosphate buffered saline (PBS). In some cases, the composition is sterile and should be fluid such that it can be drawn into a syringe or delivered to a subject from a syringe. In certain embodiments, it is stable under the conditions of manufacture and storage and is preserved against the contaminating action of microorganisms such as bacteria and fungi. The carrier can be, e.g., a solvent or dispersion medium containing, for example, water, ethanol, polyol (for example, glycerol, propylene glycol, and liquid polyethylene glycol, and the like), and suitable mixtures thereof. The proper fluidity can be maintained, for example, by the use of a coating such as lecithin, by the maintenance of the required particle size in the case of dispersion and by the use of surfactants. Prevention of the action of microorganisms can be achieved by various antibacterial and antifungal agents, for example, parabens, chlorobutanol, phenol, ascorbic acid, thimerosal, and the like. In many cases, it will be preferable to include isotonic agents, for example, sugars, polyalcohols such as mannitol, sorbitol, sodium chloride in the composition. Prolonged absorption of the internal compositions can be brought about by including in the composition an agent which delays absorption, for example, aluminum monostearate and gelatin.

[0246] Sterile solutions can be prepared by incorporating the anti-Fzd antibody or antigen-binding fragment thereof (or encoding polynucleotide or cell comprising the same) in the required amount in an appropriate solvent with one or a combination of ingredients enumerated above, as required, followed by filtered sterilization. Generally, dispersions are prepared by incorporating the active compound into a sterile vehicle that contains a basic dispersion medium and the required other ingredients from those enumerated above. In the case of sterile powders for the preparation of sterile injectable solutions, methods of preparation are vacuum drying and freeze-drying that yields a powder of the active ingredient plus any additional desired ingredient from a previously sterile-filtered solution thereof.

[0247] In one embodiment, the pharmaceutical compositions are prepared with carriers that will protect the antibody or antigen-binding fragment thereof against rapid elimination from the body, such as a controlled release formulation, including implants and microencapsulated delivery systems. Biodegradable, biocompatible polymers can be used, such as ethylene vinyl acetate, polyanhydrides, polyglycolic acid, collagen, polyorthoesters, and polylactic acid. Methods for preparation of such formulations will be apparent to those skilled in the art. The materials can also be obtained commercially. Liposomal suspensions can also be used as pharmaceutically acceptable carriers. These can be prepared according to methods known to those skilled in the art.

[0248] It may be advantageous to formulate the pharmaceutical compositions in dosage unit form for ease of administration and uniformity of dosage. Dosage unit form as used herein refers to physically discrete units suited as unitary dosages for the subject to be treated; each unit containing a predetermined quantity of active antibody or antigen-binding fragment thereof calculated to produce the desired therapeutic effect in association with the required pharmaceutical carrier. The specification for the dosage unit forms are dictated by and directly dependent on the unique characteristics of the antibody or antigen-binding fragment thereof and the particular therapeutic effect to be achieved, and the limitations inherent in the art of compounding such an active antibody or antigen-binding fragment thereof for the treatment of individuals.

[0249] The pharmaceutical compositions can be included in a container, pack, or dispenser, e.g. syringe, e.g. a prefilled syringe, together with instructions for administration.

[0250] The pharmaceutical compositions of the present disclosure encompass any pharmaceutically acceptable salts, esters, or salts of such esters, or any other compound which, upon administration to an animal comprising a human, is capable of providing (directly or indirectly) the biologically active antibody or antigen-binding fragment thereof.

[0251] The present disclosure includes pharmaceutically acceptable salts of a Wnt surrogate molecule described herein. The term “pharmaceutically acceptable salt” refers to physiologically and pharmaceutically acceptable salts of the compounds of the present disclosure: i.e., salts that retain the desired biological activity of the parent compound and do not impart undesired toxicological effects thereto. A variety of pharmaceutically acceptable salts are known in the art and described, e.g., in “Remington's Pharmaceutical Sciences”, 17th edition, Alfonso R. Gennaro (Ed.), Mark Publishing Company, Easton, Pa., USA, 1985 (and more recent editions thereof), in the “Encyclopaedia of Pharmaceutical Technology”, 3rd edition, James Swarbrick (Ed.), Informa Healthcare USA (Inc.), NY, USA, 2007, and in J. Pharm. Sci. 66: 2 (1977). Also, for a review on suitable salts, see “Handbook of Pharmaceutical Salts: Properties, Selection, and Use” by Stahl and Wermuth (Wiley-VCH, 2002).

[0252] Pharmaceutically acceptable base addition salts are formed with metals or amines, such as alkali and alkaline earth metals or organic amines. Metals used as cations comprise sodium, potassium, magnesium, calcium, and the like. Amines comprise N-N′-dibenzylethylenediamine, chloroprocaine, choline, diethanolamine, dicyclohexylamine, ethylenediamine, N-methylglucamine, and procaine (see, for example, Berge et al., “Pharmaceutical Salts,” J. Pharma Sci., 1977, 66, 119). The base addition salts of said acidic compounds are prepared by contacting the free acid form with a sufficient amount of the desired base to produce the salt in the conventional manner. The free acid form may be regenerated by contacting the salt form with an acid and isolating the free acid in the conventional manner. The free acid forms differ from their respective salt forms somewhat in certain physical properties such as solubility in polar solvents, but otherwise the salts are equivalent to their respective free acid for purposes of the present disclosure.

[0253] In some embodiments, the pharmaceutical composition provided herein comprise a therapeutically effective amount of a Wnt surrogate molecule or pharmaceutically acceptable salt thereof in admixture with a pharmaceutically acceptable carrier, diluent and/or excipient, for example saline, phosphate buffered saline, phosphate and amino acids, polymers, polyols, sugar, buffers, preservatives and other proteins. Exemplary amino acids, polymers and sugars and the like are octylphenoxy polyethoxy ethanol compounds, polyethylene glycol monostearate compounds, polyoxyethylene sorbitan fatty acid esters, sucrose, fructose, dextrose, maltose, glucose, mannitol, dextran, sorbitol, inositol, galactitol, xylitol, lactose, trehalose, bovine or human serum albumin, citrate, acetate, Ringer's and Hank's solutions, cysteine, arginine, carnitine, alanine, glycine, lysine, valine, leucine, polyvinylpyrrolidone, polyethylene and glycol. Preferably, this formulation is stable for at least six months at 4° C.

[0254] In some embodiments, the pharmaceutical composition provided herein comprises a buffer, such as phosphate buffered saline (PBS) or sodium phosphate/sodium sulfate, tris buffer, glycine buffer, sterile water and other buffers known to the ordinarily skilled artisan such as those described by Good et al. (1966) Biochemistry 5:467. The pH of the buffer may be in the range of 6.5 to 7.75, preferably 7 to 7.5, and most preferably 7.2 to 7.4.

### Methods of Use

[0255] The present disclosure also provides methods for using the Wnt surrogate molecules disclosed herein, e.g., to modulate a Wnt signaling pathway, e.g., to increase Wnt signaling, and the administration of a Wnt surrogate molecule disclosed herein in a variety of therapeutic settings. Provided herein are methods of treatment using a Wnt surrogate molecule. In one embodiment, a Wnt surrogate molecule is provided to a subject having a disease involving inappropriate or deregulated Wnt signaling, e.g., reduced Wnt signaling.

[0256] Agonizing Wnt Pathway Signaling and Related Therapeutic Methods

[0257] In certain embodiments, a Wnt surrogate molecule may be used to agonize a Wnt signaling pathway in a tissue or a cell. Agonizing the Wnt signaling pathway may include, for example, increasing Wnt signaling or enhancing Wnt signaling in a tissue or cell. Thus, in some aspects, the present disclosure provides a method for agonizing a Wnt signaling pathway in a cell, comprising contacting the tissue or cell with an effective amount of a Wnt surrogate molecule or pharmaceutically acceptable salt thereof disclosed herein, wherein the a Wnt surrogate molecule is a Wnt signaling pathway agonist. In some embodiments, contacting occurs in vitro, ex vivo, or in vivo. In particular embodiments, the cell is a cultured cell, and the contacting occurs in vitro. In certain embodiments, the method comprises further contacting the tissue or cell with one or more Wnt polypeptides or Norrin polypeptides.

[0258] In related aspects, the present disclosure provides a method for agonizing Wnt signaling in a tissue or cell, comprising contacting the tissue or cell with an effective amount of a polynucleotide comprising a Wnt surrogate molecule disclosed herein. In certain embodiments, the target tissue or cell is also contacted with a polynucleotide comprising a nucleic acid sequence that encodes a Wnt polypeptide or a Norrin polypeptide. In certain embodiments, the polynucleotides are DNA or mRNA, e.g., a modified mRNA. In particular embodiments, the polynucleotides are modified mRNAs further comprising a 5′ cap sequence and/or a 3′ tailing sequence, e.g., a polyA tail. In other embodiments, the polynucleotides are expression cassettes comprising a promoter operatively linked to the coding sequences. In certain embodiments, the nucleic acid sequence encoding the Wnt surrogate molecule and the nucleic acid sequence encoding the Wnt polypeptide or Norrin polypeptide are present in the same polynucleotide.

[0259] In related aspects, the present disclosure provides a method for agonizing Wnt signaling in a tissue or cell, comprising contacting the tissue or cell with an effective amount of a vector comprising a nucleic acid sequence encoding a Wnt surrogate molecule. In certain embodiments, the tissue or cell is also contacted with a vector comprising a nucleic acid sequence that encodes a Wnt polypeptide or a Norrin polypeptide. In certain embodiments, the vector is an expression vector, and may comprise a promoter operatively linked to the nucleic acid sequence. In particular embodiments, the vector is a viral vector. In certain embodiments, the nucleic acid sequence encoding a Wnt surrogate molecule and the nucleic acid sequence encoding the Wnt polypeptide or Norrin polypeptide are present in the same vector, e.g., in the same expression cassette.

[0260] In related aspects, the present disclosure provides a method for agonizing Wnt signaling in a tissue, comprising contacting the tissue with an effective amount of a cell comprising a nucleic acid sequence encoding a Wnt surrogate molecule of the present disclosure. In certain embodiments, the tissue is also contacted with a cell comprising a nucleic acid sequence that encodes a Wnt polypeptide or Norrin polypeptide. In certain embodiments, the nucleic acid sequence encoding the Wnt surrogate molecule and the nucleic acid sequence encoding the Wnt polypeptide or Norrin polypeptide are present in the same cell. In particular embodiments, the cell is a heterologous cell or an autologous cell obtained from the subject to be treated. In certain embodiments, the cell was transduced with a vector comprising an expression cassette encoding the Wnt surrogate molecule or the Wnt polypeptide or Norrin polypeptide. In particular embodiments, the cell is a stem cell, e.g., an adipose-derived stem cell or a hematopoietic stem cell.

[0261] Wnt surrogate molecules disclosed herein may be used in to treat a disease, disorder or condition, for example, by agonizing, e.g., increasing Wnt signaling in a targeted cell, tissue or organ. Thus, in some aspects, the present disclosure provides a method for treating a disease or condition in a subject in need thereof, e.g., a disease or disorder associated with reduced or impaired Wnt signaling, and/or for which increased Wnt signaling would provide a therapeutic benefit, comprising contacting the subject with an effective amount of a composition of the present disclosure. In particular embodiments, the composition is a pharmaceutical composition comprising any of: a Wnt surrogate molecule; a polynucleotide comprising a nucleic acid sequence encoding a Wnt surrogate molecule, e.g., a DNA or mRNA, optionally a modified mRNA; a vector comprising a nucleic acid sequence encoding a Wnt surrogate molecule, e.g., an expression vector or viral vector; or a cell comprising a nucleic acid sequence encoding a Wnt surrogate molecule, e.g., a cell transduced with an expression vector or viral vector encoding a Wnt surrogate molecule. In particular embodiments, the disease or condition is a pathological disease or disorder, or an injury, e.g., an injury resulting from a wound. In certain embodiments, the wound may be the result of another therapeutic treatment. In certain embodiments, the disease or condition comprises impaired tissue repair, healing or regeneration, or would benefit from increased tissue repair, healing or regeneration. In some embodiments, contacting occurs in vivo, i.e., the subject composition is administered to a subject.

[0262] In certain embodiments, the method comprises further contacting the subject with a pharmaceutical composition comprising one or more Wnt polypeptides or Norrin polypeptides. The present disclosure contemplates contacting a subject with a first molecule for delivery of a Wnt surrogate molecule as a first active agent and a second molecule for delivery of a Wnt polypeptide or Norrin polypeptide. The first and second molecule may be the same type of molecule or different types of molecules. For example, in certain embodiments, the first and second molecule may each be independently selected from the following types of molecules: polypeptides, small organic molecules, nucleic acids encoding the first or second active agent (optionally DNA or mRNA, optionally modified RNA), vectors comprising a nucleic acid sequence encoding the first or second active agent (optionally expression vectors or viral vectors), and cells comprising a nucleic acid sequence encoding the first or second active agent (optionally an expression cassette).

[0263] In related aspects, the present disclosure provides a method for treating a disease or condition, e.g., a disease or disorder associated with reduced Wnt signaling, or for which increased Wnt signaling would provide a therapeutic benefit, comprising contacting a subject in need thereof with a pharmaceutical composition comprising an effective amount of a polynucleotide comprising a nucleic acid sequence encoding a Wnt surrogate molecule disclosed herein. In certain embodiments, the subject is also contacted with a pharmaceutical composition comprising an effective amount of a polynucleotide comprising a nucleic acid sequence that encodes a Wnt polypeptide or a Norrin polypeptide. In certain embodiments, the polynucleotides are DNA or mRNA, e.g., a modified mRNA. In particular embodiments, the polynucleotides are modified mRNAs further comprising a 5′ cap sequence and/or a 3′ tailing sequence, e.g., a polyA tail. In other embodiments, the polynucleotides are expression cassettes comprising a promoter operatively linked to the coding sequences. In certain embodiments, the nucleic acid sequence encoding the Wnt surrogate molecule and the nucleic acid sequence encoding the Wnt polypeptide or Norrin polypeptide are present in the same polynucleotide.

[0264] In related aspects, the present disclosure provides a method for treating a disease or condition, e.g., a disease or disorder associated with reduced Wnt signaling, or for which increased Wnt signaling would provide a therapeutic benefit, comprising contacting a subject in need thereof with a pharmaceutical composition comprising an effective amount of a vector comprising a nucleic acid sequence encoding a Wnt surrogate molecule. In certain embodiments, the subject is also contacted with a pharmaceutical composition comprising an effective amount of a vector comprising a nucleic acid sequence that encodes a Wnt polypeptide or a Norrin polypeptide. In certain embodiments, the vector is an expression vector, and may comprise a promoter operatively linked to the nucleic acid sequence. In particular embodiments, the vector is a viral vector. In certain embodiments, the nucleic acid sequence encoding the Wnt surrogate molecule and the nucleic acid sequence encoding the Wnt polypeptide or Norrin polypeptide are present in the same vector, e.g., in the same expression cassette.

[0265] In related aspects, the present disclosure provides a method for treating a disease or condition, e.g., a disease or disorder associated with reduced Wnt signaling, or for which increased Wnt signaling would provide a therapeutic benefit, comprising contacting a subject in need thereof with a pharmaceutical composition comprising an effective amount of a cell comprising a nucleic acid sequence encoding a Wnt surrogate molecule. In certain embodiments, the subject is also contacted with a cell comprising a nucleic acid sequence that encodes a Wnt polypeptide or a Norrin polypeptide. In certain embodiments, the nucleic acid sequence encoding the Wnt surrogate molecule and the nucleic acid sequence encoding the Wnt polypeptide or Norrin polypeptide are present in the same cell. In particular embodiments, the cell is a heterologous cell or an autologous cell obtained from the subject to be treated. In certain embodiments, the cell was transduced with a vector comprising an expression cassette encoding the Wnt surrogate molecule or the Wnt polypeptide or Norrin polypeptide. In particular embodiments, the cell is a stem cell, e.g., an adipose-derived stem cell or a hematopoietic stem cell.

[0266] Wnt signaling plays key roles in the developmental process and maintenance of stem cells. Reactivation of Wnt signals is associated with regeneration and repair of most tissues after injuries and diseases. Wnt surrogate molecule molecules are expected to provide benefit of healing and tissue repair in response to injuries and diseases. Causes of tissue damage and loss include but are not limited to aging, degeneration, hereditary conditions, infection and inflammation, traumatic injuries, toxins/metabolic-induced toxicities, or other pathological conditions. Wnt signals and enhancers of Wnt signals have been shown to activate adult, tissue-resident stem cells. In some embodiments, the compounds of the present disclosure are administered for use in treating diseased or damaged tissue, for use in tissue regeneration and for use in cell growth and proliferation, and/or for use in tissue engineering.

[0267] Human diseases associated with mutations of the Wnt pathway provide strong evidence for enhancement of Wnt signals in the treatment and prevention of diseases. Preclinical in vivo and in vitro studies provide additional evidence of involvement of Wnt signals in many disease conditions and further support utilization of a Wnt surrogate molecule in various human diseases. For example, compositions of the present disclosure may be used to promote or increase bone growth or regeneration, bone grafting, healing of bone fractures, stress fractures, vertebral compression fractures, treatment of osteoporosis and osteoporotic fractures, spinal fusion, osseointegration of orthopedic devices, tendon-bone integration, tooth growth and regeneration, dental implantation, periodontal diseases, maxillofacial reconstruction, and osteonecrosis of the jaw. They may also be used in the treatment of alopecia; enhancing regeneration of sensory organs, e.g. treatment of hearing loss, treatment of vestibular hypofunction, treatment of macular degeneration, treatment of vitreoretinopathy, other diseases of retinal degeneration, Fuchs' dystrophy, other cornea disease, etc.; treatment of stroke, traumatic brain injury, Alzheimer's disease, multiple sclerosis, muscular dystrophy, muscle atrophy caused by sarcopenia or cachexia, and other conditions affecting the blood brain barrier; treatment of spinal cord injuries, other spinal cord diseases. The compositions of this present disclosure may also be used in treatment of oral mucositis, treatment of short bowel syndrome, inflammatory bowel diseases (IBD), other gastrointestinal disorders; treatment of metabolic syndrome; treatment of diabetes, dyslipidemia, treatment of pancreatitis, conditions where exocrine or endocrine pancreas tissues are damaged; conditions where enhanced epidermal regeneration is desired, e.g., epidermal wound healing, treatment of diabetic foot ulcers, syndromes involving tooth, nail, or dermal hypoplasia, etc., conditions where angiogenesis is beneficial; treatment of myocardial infarction, coronary artery disease, heart failure; enhanced growth of hematopoietic cells, e.g. enhancement of hematopoietic stem cell transplants from bone marrow, mobilized peripheral blood, treatment of immunodeficiencies, graft versus host diseases, etc.; treatment of acute kidney injuries, chronic kidney diseases; treatment of lung diseases, chronic obstructive pulmonary diseases (COPD), idiopathic pulmonary fibrosis (IPF), enhanced regeneration of lung tissues. The compositions of the present disclosure may also be used in enhanced regeneration of liver cells, e.g. liver regeneration, treatment of cirrhosis, enhancement of liver transplantations, treatment of acute liver failure, treatment of chronic liver diseases with hepatitis C or B virus infection or post-antiviral drug therapies, alcoholic liver diseases, alcoholic hepatitis, non-alcoholic liver diseases with steatosis or steatohepatitis (NASH), and the like. The compositions of this present disclosure may treat diseases and disorders including, without limitation, conditions in which regenerative cell growth is desired.

[0268] Human genetics involving loss-of-function or gain-of-function mutations in Wnt signaling components show strong evidence supporting enhancing Wnt signals for bone growth. Conditions in which enhanced bone growth is desired may include, without limitation, fractures, grafts, ingrowth around prosthetic devices, osteoporosis, osteoporotic fractures, spinal fusion, osteonecrosis of the jaw, dental implantation, periodontal diseases, maxillofacial reconstruction, and the like. Wnt surrogate molecules enhance and promotes Wnt signals which are critical in promoting bone regeneration. Methods for regeneration of bone tissues benefit from administration of the compounds of the present disclosure, which can be systemic or localized. In some embodiments, bone marrow cells are exposed to molecules of the present disclosure, such that stem cells within that marrow become activated.

[0269] In some embodiments, bone regeneration is enhanced by contacting a responsive cell population, e.g., bone marrow, bone progenitor cells, bone stem cells, etc. with an effective dose of a Wnt surrogate molecule disclosed herein. Methods for regeneration of bone tissues benefit from administration of the Wnt surrogate molecule which can be systemic or localized. In some such embodiments, the contacting is performed in vivo. In other such embodiments, the contacting is performed ex vivo. The molecule may be localized to the site of action, e.g. by loading onto a matrix, which is optionally biodegradable, and optionally provides for a sustained release of the active agent. Matrix carriers include, without limitation, absorbable collagen sponges, ceramics, hydrogels, polymeric microspheres, nanoparticles, bone cements, and the like.

[0270] In particular embodiments, compositions comprising one or more Wnt surrogate molecule disclosed herein (or a polynucleotide encoding a Wnt surrogate molecule, or a vector or cell comprising a polynucleotide encoding a Wnt surrogate molecule) are used to treat or prevent a bone disease or disorder, including but not limited to any of the following, or to treat or prevent an injury associated with, but not limited to, any of the following: osteoporosis, osteoporotic fractures, bone fractures, non-union fractures, delayed union fractures, spinal fusion, osteonecrosis, osteonecrosis of the jaw, hip, femoral head, etc., osseointegration of implants (e.g., to accelerate recovery following partial or total knee or hip replacement), osteogenesis imperfecta, bone grafts, tendon repair, maxillofacial surgery, dental implant, all other bone disorders or defects resulting from genetic diseases, degeneration, aging, drugs, or injuries. In one embodiment, Wnt surrogate molecules that bind Fzd1, Fzd 2, and Fzd 7, and also LRP5 and/or LRP6, are used to treat or prevent any bone disease or disorder. In one embodiment, Wnt surrogate molecules that bind Fzd1, Fzd 2, Fzd 5, Fzd 7 and Fzd 8, and also LRP5 and/or LRP6, are used to treat or prevent any bone disease or disorder.

[0271] In particular embodiments, compositions and methods disclosed herein may be used to: increase bone mineral density, increase bone volume (e.g., tibia and/or femur bone volume), increase cortical thickness (e.g., in trabecular region or in femur mid-diaphysis), increase mineral apposition rate, increase the number of osteblasts and/or decrease the number of osteoclasts (e.g., in bone), increase bone stiffness, increase the ultimate load to fracture point, improve bone resistance to fracture, decrease bone loss associated with osteoporosis, or increase biochemical strength of bone, in a subject. In one embodiment, Wnt surrogate molecules that bind Fzd1, Fzd 2, and Fzd 7 are used for any of these indicated uses. In one embodiment, Wnt surrogate molecules that bind Fzd1, Fzd 2, Fzd 5, Fzd 7 and Fzd 8 are used for any of these indicated uses.

[0272] Compositions comprising one or more Wnt surrogate molecule disclosed herein (or a polynucleotide encoding a Wnt surrogate molecule, or a vector or cell comprising a polynucleotide encoding a Wnt surrogate molecule) can be used for the in vivo treatment of skeletal tissue deficiencies. By “skeletal tissue deficiency”, it is meant a deficiency in bone or other skeletal connective tissue at any site where it is desired to restore the bone or connective tissue, no matter how the deficiency originated, e.g. whether as a result of surgical intervention, removal of tumor, ulceration, implant, fracture, or other traumatic or degenerative conditions. The compositions of the present disclosure can be used as part of a regimen for restoring cartilage function to a connective tissue, for the repair of defects or lesions in cartilage tissue such as degenerative wear and arthritis, trauma to the tissue, displacement of torn meniscus, meniscectomy, a luxation of a joint by a torn ligament, malalignment of joints, bone fracture, or by hereditary disease.

[0273] A Wnt surrogate molecule may also be used for treatment of periodontal diseases. Periodontal diseases are a leading cause of tooth loss and are linked to multiple systemic conditions. In some embodiments, tooth or underlying bone regeneration is enhanced by contacting a responsive cell population. In some such embodiments, the contacting is performed in vivo. In other such embodiments, the contacting is performed ex vivo, with subsequent implantation of the activated stem or progenitor cells. The molecule may be localized to the site of action, e.g. by loading onto a matrix, which is optionally biodegradable, and optionally provides for a sustained release of the active agent. Matrix carriers include, without limitation, absorbable collagen sponges, ceramics, hydrogels, bone cements, polymeric microspheres, nanoparticles, and the like.

[0274] Studies have shown that biology of Wnt signaling and R-spondins are capable of promoting sensory hair cell regeneration in the inner ear following injuries, aging, or degeneration. Loss of sensory hair cells in the inner ear involved in hearing loss or vestibular hypofunction may also benefit from the compositions of the present disclosure. In the inner ear, the auditory organ houses mechanosensitive hair cells required for translating sound vibration to electric impulses. The vestibular organs, comprised of the semicircular canals (SSCs), the utricle, and the saccule, also contain sensory hair cells in order to detect head position and motion. Compositions of the present disclosure can be used, for example, in an infusion; in a matrix or other depot system; or other topical application to the ear for enhancement of auditory regeneration.

[0275] A Wnt surrogate molecule may also be used in regeneration of retinal tissue. In the adult mammalian retina, Muller glia cells are capable of regenerating retinal cells, including photoreceptors, for example after neurotoxic injury in vivo. Wnt signaling and enhancers of Wnt signals can promote proliferation of Muller glia-derived retinal progenitors after damage or during degeneration. The compositions of the present disclosure may also be used in the regeneration of tissues and other cell types in the eye. For examples age-related macular degeneration (AMD), other retina degenerative diseases, cornea diseases, Fuchs' dystrophy, vitreoretinopathy, hereditary diseases, etc. can benefit from the compositions of the present disclosure. AMD is characterized by progressively decreased central vision and visual acuity. Fuchs' dystrophy is characterized by progressive loss of cornea endothelial cells. Wnt signal and enhancing of Wnt signal can promote regeneration of cornea endothelium, retina epithelium, etc. in the eye tissue. In other embodiments, compositions of the present disclosure can be used, for example, in an infusion; in a matrix or other depot system; or other topical application to the eye for retinal regeneration and treatment of macular degeneration.

[0276] Specific populations of proliferating cells for homeostatic renewal of hepatocytes have been identified through lineage tracing studies, for example Axin2-positive cells in peri-central region. Lineage tracing studies also identified additional potential liver progenitor cells, including but not limited to Lgr-positive cells. The self-renewing liver cells and other populations of potential progenitor cells, including Lgr5-positive and Axin2-positive cells, are identified to be capable of regeneration responding to Wnt signals and/or R-spondins following injuries. Numerous preclinical models of acute liver injury and failure and chronic liver diseases showed recovery and regeneration of hepatocytes benefit from enhancing Wnt signals.

[0277] In certain embodiments, compositions comprising a Wnt surrogate molecule disclosed herein (or a polynucleotide encoding a Wnt surrogate molecule, or a vector or cell comprising a polynucleotide encoding a Wnt surrogate molecule) are used to promote liver regeneration, reduce fibrosis, and/or improve liver function. In certain embodiments, compositions and methods disclosed herein are used to: increase liver weight, increase the liver to body weight ratio, increase the number of PCNA and pH3 positive nuclei in liver, increase expression of Ki67 and/or Cyclin D1 in liver, increase liver cell proliferation and/or mitosis, decrease fibrosis following chronic liver injury, or increase hepatocyte function.

[0278] In particular embodiments, the compositions of this disclosure may be used in treatment of acute liver failure, acute alcoholic liver injuries, treatment of chronic liver diseases with hepatitis C or B virus infection or post-antiviral drug therapies, chronic alcoholic liver diseases, non-alcoholic fatty liver diseases and non-alcoholic steatohepatitis (NASH), treatment of cirrhosis and severe chronic liver diseases of all causes, and enhanced regeneration of liver cells. Methods for regeneration of liver tissue benefit from administration of the compounds of the present disclosure, which can be systemic or localized. These include, but are not limited to, methods of systemic administration and methods of localized administration e.g. by injection into the liver tissue, by injection into veins or blood vessels leading into the liver, by implantation of a sustained release formulation, and the like.

[0279] In particular embodiments, compositions comprising a Wnt surrogate molecule disclosed herein (or a polynucleotide encoding a Wnt surrogate molecule, or a vector or cell comprising a polynucleotide encoding a Wnt surrogate molecule) are used to treat or prevent a liver disease or disorder, including but not limited to, or to treat or prevent a liver injury or disorder resulting from any of the following: acute liver failure (all causes), chronic liver failure (all causes), cirrhosis, liver fibrosis (all causes), portal hypertension, nonalcoholic steatohepatisis (NASH), nonalcoholic fatty liver disease (NAFLD) (fatty liver), alcoholic hepatitis, hepatitis C virus-induced liver diseases (HCV), hepatitis B virus-induced liver diseases (HBV), other viral hepatitis (e.g., hepatitis A virus-induced liver diseases (HAV) and hepatitis D virus-induced liver diseases (HDV)), primary biliary cirrhosis, autoimmune hepatitis, livery surgery, liver injury, liver transplantation, “small for size” syndrome in liver surgery and transplantation, congenital liver disease and disorders, any other liver disorder or defect resulting from genetic diseases, degeneration, aging, drugs, or injuries.

[0280] Wnt signals play an important role in regeneration of various epithelial tissues. Various epidermal conditions benefit from treatment with the compounds of the present disclosure. Mucositis occurs when there is a breakdown of the rapidly divided epithelial cells lining the gastro-intestinal tract, leaving the mucosal tissue open to ulceration and infection. The part of the epithelial lining that covers the mouth, called the oral mucosa, is one of the most sensitive parts of the body and is particularly vulnerable to chemotherapy and radiation. Oral mucositis is probably the most common, debilitating complication of cancer treatments, particularly chemotherapy and radiation. In addition, the compositions of the present disclosure may also benefit treatment of short bowel syndrome, inflammatory bowel diseases (IBD), or other gastrointestinal disorders. Other epidermal conditions include epidermal wound healing, diabetic foot ulcers, syndromes involving tooth, nail, or dermal hypoplasia, and the like. Molecules of the present disclosure may be used in all these conditions, where regenerative cells are contacted with compounds of the present disclosure. Methods for regeneration of epithelial tissues benefit from administration of the compounds of the present disclosure, which can be systemic or localized. Contacting can be, for example, topical, including intradermal, subdermal, in a gel, lotion, cream etc. applied at targeted site, etc.

[0281] In addition to skin and gastrointestinal tract, Wnt signals and enhancement and promotion of Wnt signals also play an important role in repair and regeneration of tissues including pancreas, kidney, and lung in preclinical models. A Wnt surrogate molecule may benefit various disease conditions involving exocrine and endocrine pancreas, kidney, or lung. The Wnt surrogate molecules may be used in treatment of metabolic syndrome; treatment of diabetes, treatment of acute or chronic pancreatitis, exocrine pancreatic insufficiency, treatment of acute kidney injuries, chronic kidney diseases, treatment of lung diseases, including but not limited to chronic obstructive pulmonary diseases (COPD), other conditions that cause loss of lung epithelial tissues. Methods for regeneration of these tissues benefit from administration of the compounds of the present disclosure, which can be systemic or localized.

[0282] Epidermal Wnt signaling, in coordination with signaling via other development factors, is critical for adult hair follicle regeneration. Hair loss is a common problem, and androgenetic alopecia, often called male pattern baldness, is the most common form of hair loss in men. In some embodiments, hair follicle regeneration is enhanced by contacting a responsive cell population with a molecule of the present disclosure. In some such embodiments, the contacting is performed in vivo. In other such embodiments, the contacting is performed ex vivo. The molecule may be localized to the site of action, e.g. topical lotions, gels, creams and the like.

[0283] Stroke, traumatic brain injury, Alzheimer's disease, multiple sclerosis and other conditions affecting the blood brain barrier (BBB) may be treated with a Wnt surrogate molecule. Angiogenesis is critical to ensure the supply of oxygen and nutrients to many tissues throughout the body, and is especially important for the CNS as the neural tissue is extremely sensitive to hypoxia and ischemia. CNS endothelial cells which form the BBB differ from endothelial cells in non-neural tissue, in that they are highly polarized cells held together by tight junctions and express specific transporters. Wnt signaling regulates CNS vessel formation and/or function. Conditions in which the BBB is compromised can benefit from administration of the compounds of the present disclosure, which can be systemic or localized e.g. by direct injection, intrathecal administration, implantation of sustained release formulations, and the like. In addition, Wnt signal is actively involved in neurogenesis and plays a role of neuroprotection following injury. The compositions of the present disclosure may also be used in treatment of spinal cord injuries, other spinal cord diseases, stroke, traumatic brain injuries, etc.

[0284] Wnt signals also play a role in angiogenesis. A Wnt surrogate molecule may benefit conditions where angiogenesis is beneficial, treatment of myocardial infarction, coronary artery disease, heart failure, etc., and conditions from hereditary diseases. Methods for regeneration of these tissues benefit from administration of the compounds of the present disclosure, which can be systemic or localized.

[0285] In certain embodiments, methods of the present disclosure promote tissue regeneration, e.g., in a tissue subjected to damage or tissue or cell reduction or loss. The loss or damage can be anything which causes the cell number to diminish, including diseases or injuries. For example, an accident, an autoimmune disorder, a therapeutic side-effect or a disease state could constitute trauma. Tissue regeneration increases the cell number within the tissue and preferably enables connections between cells of the tissue to be re-established, and more preferably the functionality of the tissue to be regained.

[0286] The terms “administering” or “introducing” or “providing”, as used herein, refer to delivery of a composition to a cell, to cells, tissues and/or organs of a subject, or to a subject. Such administering or introducing may take place in vivo, in vitro or ex vivo.

[0287] In particular embodiments, a pharmaceutical composition is administered parenterally, e.g., intravenously, orally, rectally, or by injection. In some embodiments, it is administered locally, e.g., topically or intramuscularly. In some embodiments, a composition is administered to target tissues, e.g., to bone, joints, ear tissue, eye tissue, gastrointestinal tract, skin, a wound site or spinal cord. Methods of the present disclosure may be practiced in vivo or ex vivo. In some embodiments, the contacting of a target cell or tissue with a Wnt surrogate molecule is performed ex vivo, with subsequent implantation of the cells or tissues, e.g., activated stem or progenitor cells, into the subject. The skilled artisan can determine an appropriate site of and route of administration based on the disease or disorder being treated.

[0288] The dose and dosage regimen may depend upon a variety of factors readily determined by a physician, such as the nature of the disease or disorder, the characteristics of the subject, and the subject's history. In particular embodiments, the amount of a Wnt surrogate molecule administered or provided to the subject is in the range of about 0.01 mg/kg to about 50 mg/kg, 0.1 mg/kg to about 500 mg/kg, or about 0.1 mg/kg to about 50 mg/kg of the subject's body weight.

[0289] The terms “treatment”, “treating” and the like are used herein to generally mean obtaining a desired pharmacologic and/or physiologic effect. The effect may be prophylactic in terms of completely or partially preventing a disease or symptom thereof, e.g. reducing the likelihood that the disease or symptom thereof occurs in the subject, and/or may be therapeutic in terms of a partial or complete cure for a disease and/or adverse effect attributable to the disease. “Treatment” as used herein covers any treatment of a disease in a mammal, and includes: (a) preventing the disease from occurring in a subject which may be predisposed to the disease but has not yet been diagnosed as having it; (b) inhibiting the disease, i.e., arresting its development; or (c) relieving the disease, i.e., causing regression of the disease. The therapeutic agent (e.g., a Wnt surrogate molecule) may be administered before, during or after the onset of disease or injury. The treatment of ongoing disease, where the treatment stabilizes or reduces the undesirable clinical symptoms of the patient, is of particular interest. Such treatment is desirably performed prior to complete loss of function in the affected tissues. The subject therapy will desirably be administered during the symptomatic stage of the disease, and in some cases after the symptomatic stage of the disease. In some embodiments, the subject method results in a therapeutic benefit, e.g., preventing the development of a disorder, halting the progression of a disorder, reversing the progression of a disorder, etc. In some embodiments, the subject method comprises the step of detecting that a therapeutic benefit has been achieved. The ordinarily skilled artisan will appreciate that such measures of therapeutic efficacy will be applicable to the particular disease being modified, and will recognize the appropriate detection methods to use to measure therapeutic efficacy.

[0290] Other embodiments relate, in part, to the use of the Wnt surrogate molecules disclosed herein to promote or enhance the growth or proliferation of cells, tissues and organoids, for example, by contacting cells or tissue with one or more Wnt surrogate, optionally in combination with a Norrin or Rspondin polypeptide. In certain embodiments, the cells or tissue are contacted ex vivo, in vitro, or in vivo. Such methods may be used to generate cells, tissue or organoids for therapeutic use, e.g., to be transplanted or grafted into a subject. They may also be used to generate cells, tissue or organoids for research use. The Wnt surrogate molecules have widespread applications in non-therapeutic methods, for example in vitro research methods.

[0291] The present disclosure provides a method for tissue regeneration of damaged tissue, such as the tissues discussed above, comprising administering a Wnt surrogate molecule to cells. The Wnt surrogate molecule may be administered directly to the cells in vivo, administered to a subject orally, intravenously, or by other methods known in the art, or administered to ex vivo cells. In some embodiments where the Wnt surrogate molecule is administered to ex vivo cells, these cells may be transplanted into a subject before, after or during administration of the Wnt surrogate molecule.

[0292] Wnt signaling is a key component of stem cell culture. For example, the stem cell culture media as described in WO2010/090513, WO2012/014076, Sato et al., 2011 (GASTROENTEROLOGY 2011; 141: 1762-1772) and Sato et al., 2009 (Nature 459, 262-5). The Wnt surrogate molecules disclosed herein are suitable alternatives to Rspondin for use in these stem cell culture media, or may be combined with Rspondin.

[0293] Accordingly, in one embodiment, the disclosure provides a method for enhancing the proliferation of stem cells comprising contacting stem cells with one or more Wnt surrogate molecules disclosed herein. In one embodiment, the disclosure provides a cell culture medium comprising one or more Wnt surrogate molecules disclosed herein. In some embodiments, the cell culture medium may be any cell culture medium already known in the art that normally comprises Wnt or Rspondin, but wherein the Wnt or Rspondin is replaced (wholly or partially) or supplemented by Wnt surrogate molecule(s) disclosed herein. For example, the culture medium may be as described in as described in WO2010/090513, WO2012/014076, Sato et al., 2011 (GASTROENTEROLOGY 2011; 141: 1762-1772) and Sato et al., 2009 (Nature 459, 262-5), which are hereby incorporated by reference in their entirety.

[0294] Stem cell culture media often comprise additional growth factors. This method may thus additionally comprise supplying the stem cells with a growth factor. Growth factors commonly used in cell culture medium include epidermal growth factor (EGF, (Peprotech), Transforming Growth Factor-alpha (TGF-alpha, Peprotech), basic Fibroblast Growth Factor (bFGF, Peprotech), brain-derived neurotrophic factor (BDNF, R&D Systems), Hepatocyte Growth Factor (HGF) and Keratinocyte Growth Factor (KGF, Peprotech, also known as FGF7). EGF is a potent mitogenic factor for a variety of cultured ectodermal and mesodermal cells and has a profound effect on the differentiation of specific cells in vivo and in vitro and of some fibroblasts in cell culture. The EGF precursor exists as a membrane-bound molecule which is proteolytically cleaved to generate the 53-amino acid peptide hormone that stimulates cells. EGF or other mitogenic growth factors may thus be supplied to the stem cells. During culturing of stem cells, the mitogenic growth factor may be added to the culture medium every second day, while the culture medium is refreshed preferably every fourth day. In general, a mitogenic factor is selected from the groups consisting of: i) EGF, TGF-alpha, and KGF, ii) EGF, TGF-alpha, and FGF7; iii) EGF, TGF-alpha, and FGF; iv) EGF and KGF; v) EGF and FGF7; vi) EGF and a FGF; vii) TGF-alpha and KGF; viii) TGF-alpha, and FGF7; ix) or from TGF-alpha and a FGF. In certain embodiments, the disclosure includes a stem cell culture media comprising a Wnt surrogate molecule disclosed herein, e.g., optionally in combination with one or more of the growth factors or combinations thereof described herein.

[0295] These methods of enhancing proliferation of stem cells can be used to grow new organoids and tissues from stem cells, as for example described in WO2010/090513 WO2012/014076, Sato et al., 2011 (GASTROENTEROLOGY 2011; 141: 1762-1772) and Sato et al., 2009 (Nature 459, 262-5).

[0296] In some embodiments, the Wnt surrogate molecules are used to enhance stem cell regeneration. Illustrative stem cells of interest include but are not limited to: muscle satellite cells; hematopoietic stem cells and progenitor cells derived therefrom (U.S. Pat. No. 5,061,620); neural stem cells (see Morrison et al. (1999) Cell 96: 737-749); embryonic stem cells; mesenchymal stem cells; mesodermal stem cells; liver stem cells; adipose-tissue derived stem cells, etc.

[0297] Other embodiments of the present disclosure relate, in part, to diagnostic applications for detecting the presence of cells or tissues expressing one or more Fzd receptors or LRP5 or LRP6 receptors. Thus, the present disclosure provides methods of detecting one or more Fzd receptors or LRP5 or LRP6 receptors in a sample, such as detection of cells or tissues expressing Fzd1. Such methods can be applied in a variety of known detection formats, including, but not limited to immunohistochemistry (IHC), immunocytochemistry (ICC), in situ hybridization (ISH), whole-mount in situ hybridization (WISH), fluorescent DNA in situ hybridization (FISH), flow cytometry, enzyme immuno-assay (EIA), and enzyme linked immuno-assay (ELISA), e.g., by detecting binding of a Wnt surrogate molecule.

[0298] ISH is a type of hybridization that uses a labeled complementary DNA or RNA strand (i.e., primary binding agent) to localize a specific DNA or RNA sequence in a portion or section of a cell or tissue (in situ), or if the tissue is small enough, the entire tissue (whole mount ISH). One having ordinary skill in the art would appreciate that this is distinct from immunohistochemistry, which localizes proteins in tissue sections using an antibody as a primary binding agent. DNA ISH can be used on genomic DNA to determine the structure of chromosomes. Fluorescent DNA ISH (FISH) can, for example, be used in medical diagnostics to assess chromosomal integrity. RNA ISH (hybridization histochemistry) is used to measure and localize mRNAs and other transcripts within tissue sections or whole mounts.

[0299] In various embodiments, the Wnt surrogate molecules described herein are conjugated to a detectable label that may be detected directly or indirectly. In this regard, an antibody “conjugate” refers to a Wnt surrogate molecule that is covalently linked to a detectable label. In the present disclosure, DNA probes, RNA probes, monoclonal antibodies, antigen-binding fragments thereof, and antibody derivatives thereof, such as a single-chain-variable-fragment antibody or an epitope tagged antibody, may all be covalently linked to a detectable label. In “direct detection”, only one detectable antibody is used, i.e., a primary detectable antibody. Thus, direct detection means that the antibody that is conjugated to a detectable label may be detected, per se, without the need for the addition of a second antibody (secondary antibody).

[0300] A “detectable label” is a molecule or material that can produce a detectable (such as visually, electronically or otherwise) signal that indicates the presence and/or concentration of the label in a sample. When conjugated to an antibody, the detectable label can be used to locate and/or quantify the target to which the specific antibody is directed. Thereby, the presence and/or concentration of the target in a sample can be detected by detecting the signal produced by the detectable label. A detectable label can be detected directly or indirectly, and several different detectable labels conjugated to different specific-antibodies can be used in combination to detect one or more targets.

[0301] Examples of detectable labels, which may be detected directly, include fluorescent dyes and radioactive substances and metal particles. In contrast, indirect detection requires the application of one or more additional antibodies, i.e., secondary antibodies, after application of the primary antibody. Thus, the detection is performed by the detection of the binding of the secondary antibody or binding agent to the primary detectable antibody. Examples of primary detectable binding agents or antibodies requiring addition of a secondary binding agent or antibody include enzymatic detectable binding agents and hapten detectable binding agents or antibodies.

[0302] In some embodiments, the detectable label is conjugated to a nucleic acid polymer which comprises the first binding agent (e.g., in an ISH, WISH, or FISH process). In other embodiments, the detectable label is conjugated to an antibody which comprises the first binding agent (e.g., in an IHC process).

[0303] Examples of detectable labels which may be conjugated to Wnt surrogate molecules used in the methods of the present disclosure include fluorescent labels, enzyme labels, radioisotopes, chemiluminescent labels, electrochemiluminescent labels, bioluminescent labels, polymers, polymer particles, metal particles, haptens, and dyes.

[0304] Examples of fluorescent labels include 5-(and 6)-carboxyfluorescein, 5- or 6-carboxyfluorescein, 6-(fluorescein)-5-(and 6)-carboxamido hexanoic acid, fluorescein isothiocyanate, rhodamine, tetramethylrhodamine, and dyes such as Cy2, Cy3, and Cy5, optionally substituted coumarin including AMCA, PerCP, phycobiliproteins including R-phycoerythrin (RPE) and allophycoerythrin (APC), Texas Red, Princeton Red, green fluorescent protein (GFP) and analogues thereof, and conjugates of R-phycoerythrin or allophycoerythrin, inorganic fluorescent labels such as particles based on semiconductor material like coated CdSe nanocrystallites.

[0305] Examples of polymer particle labels include micro particles or latex particles of polystyrene, PMMA or silica, which can be embedded with fluorescent dyes, or polymer micelles or capsules which contain dyes, enzymes or substrates.

[0306] Examples of metal particle labels include gold particles and coated gold particles, which can be converted by silver stains. Examples of haptens include DNP, fluorescein isothiocyanate (FITC), biotin, and digoxigenin. Examples of enzymatic labels include horseradish peroxidase (HRP), alkaline phosphatase (ALP or AP), β-galactosidase (GAL), glucose-6-phosphate dehydrogenase, β-N-acetylglucosamimidase, β-glucuronidase, invertase, Xanthine Oxidase, firefly luciferase and glucose oxidase (GO). Examples of commonly used substrates for horseradishperoxidase include 3,3′-diaminobenzidine (DAB), diaminobenzidine with nickel enhancement, 3-amino-9-ethylcarbazole (AEC), Benzidine dihydrochloride (BDHC), Hanker-Yates reagent (HYR), Indophane blue (IB), tetramethylbenzidine (TMB), 4-chloro-1-naphtol (CN), .alpha.-naphtol pyronin (.alpha.-NP), o-dianisidine (OD), 5-bromo-4-chloro-3-indolylphosp-hate (BCIP), Nitro blue tetrazolium (NBT), 2-(p-iodophenyl)-3-p-nitropheny-I-5-phenyl tetrazolium chloride (INT), tetranitro blue tetrazolium (TNBT), 5-bromo-4-chloro-3-indoxyl-beta-D-galactoside/ferro-ferricyanide (BCIG/FF).

[0307] Examples of commonly used substrates for Alkaline Phosphatase include Naphthol-AS-B 1-phosphate/fast red TR (NABP/FR), Naphthol-AS-MX-phosphate/fast red TR (NAMP/FR), Naphthol-AS-B1-phosphate/-fast red TR (NABP/FR), Naphthol-AS-MX-phosphate/fast red TR (NAMP/FR), Naphthol-AS-B1-phosphate/new fuschin (NABP/NF), bromochloroindolyl phosphate/nitroblue tetrazolium (BCIP/NBT), 5-Bromo-4-chloro-3-indolyl-b-d-galactopyranoside (BCIG).

[0308] Examples of luminescent labels include luminol, isoluminol, acridinium esters, 1,2-dioxetanes and pyridopyridazines. Examples of electrochemiluminescent labels include ruthenium derivatives. Examples of radioactive labels include radioactive isotopes of iodide, cobalt, selenium, tritium, carbon, sulfur and phosphorous.

[0309] Detectable labels may be linked to the antibodies described herein or to any other molecule that specifically binds to a biological marker of interest, e.g., an antibody, a nucleic acid probe, or a polymer. Furthermore, one of ordinary skill in the art would appreciate that detectable labels can also be conjugated to second, and/or third, and/or fourth, and/or fifth binding agents or antibodies, etc. Moreover, the skilled artisan would appreciate that each additional binding agent or antibody used to characterize a biological marker of interest may serve as a signal amplification step. The biological marker may be detected visually using, e.g., light microscopy, fluorescent microscopy, electron microscopy where the detectable substance is for example a dye, a colloidal gold particle, a luminescent reagent. Visually detectable substances bound to a biological marker may also be detected using a spectrophotometer. Where the detectable substance is a radioactive isotope detection can be visually by autoradiography, or non-visually using a scintillation counter. See, e.g., Larsson, 1988, Immunocytochemistry: Theory and Practice, (CRC Press, Boca Raton, Fla.); Methods in Molecular Biology, vol. 80 1998, John D. Pound (ed.) (Humana Press, Totowa, N.J.).

[0310] The present disclosure further provides kits for detecting one or more Fzd or LRP5/6 receptor or cells or tissues expressing one or more Fzd or LRP5/6 receptors in a sample, wherein the kits contain at least one antibody, polypeptide, polynucleotide, vector or host cell as described herein. In certain embodiments, a kit may comprise buffers, enzymes, labels, substrates, beads or other surfaces to which the antibodies of the present disclosure are attached, and the like, and instructions for use.

[0311] All of the above U.S. patents, U.S. patent application publications, U.S. patent applications, foreign patents, foreign patent applications and non-patent publications referred to in this specification and/or listed in the Application Data Sheet, are incorporated herein by reference, in their entirety.

[0312] From the foregoing it will be appreciated that, although specific embodiments of the present disclosure have been described herein for purposes of illustration, various modifications may be made without deviating from the spirit and scope of the present disclosure. Accordingly, the present disclosure is not limited except as by the appended claims.

### EXAMPLES

### Example 1

### Multispecific Wnt Surrogate Molecules

[0313] A number of multispecific Wnt surrogate molecules representing different configurations were produced, as further described in the following Examples. These included the Wnt surrogate molecules disclosed in Table 5 below, which comprise the sequences set forth in SEQ ID NOs:109-157. The specific Fzd and LRP binding elements used for Wnt surrogate molecules presented in these examples are listed in Tables 1A and 1B and 2A and 2B.

TABLE 5
Wnt surrogate molecule sequences

| | SEQ ID | |
|---|---|---|
| Name | NO | Sequence |
| R2M3-3 LC | 109 | MDMRVPAQLLGLLLLWLRGARCDVQLVESGGGLVQPGGSLRLSCTSSANINSIE |
| | | TLGWYRQAPGKQRELIANMRGGGYMKYAGSLKGRFTMSTESAKNTMYLQMNS |
| | | LKPEDTAVYYCYVKLRDDDYVYRGQGTQVTVSSGSGSGQAVVLQEPSLSVSPG |
| | | GTVTLTCGLSSGSVSTNYYPSWYQQTPGQAPRTLIYYTNTRSSDVPERFSGSIV |
| | | GNKAALTITGAQPDDESVYFCLLYLGRGIWVFGGGTKLTVLGQPKAAPSVTLFP |
| | | PSSEELQANKATLVCLISDFYPGAVTVAWKADSSPVKAGVETTTPSKQSNNKYA |
| | | ASSYLSLTPEQWKSHRSYSCQVTHEGSTVEKTVAPTECS |
| R2M3-3 HC | 110 | MDMRVPAQLLGLLLLWLRGARCEVQLVQSGAEVKKPGASVKVSCKASGYTFT |
| | | SYGISWVRQAPGQGLEWMGWISAYNGNTNYAQKLQGRVTMTTDTSTSTAYM |
| | | ELRSLRSDDTAVYYCASSKEKATYYYGMDVWGQGTTVTVSSASTKGPSVFPL |
| | | APSSKSTSGGTAALGCLVKDYFPEPVTVSWNSGALTSGVHTFPAVLQSSGLY |
| | | SLSSVVTVPSSSLGTQTYICNVNHKPSNTKVDKKVEPKSCDKTHTCPPCPAPE |
| | | AAGGPSVFLFPPKPKDTLMISRTPEVTCVVVDVSHEDPEVKFNWYVDGVEVHN |
| | | AKTKPREEQYNSTYRVVSVLTVLHQDWLNGKEYKCKVSNKALGAPIEKTISKA |
| | | KGQPREPQVYTLPPSREEMTKNQVSLTCLVKGFYPSDIAVEWESNGQPENNY |
| | | KTTPPVLDSDGSFFLYSKLTVDKSRWQQGNVFSCSVMHEALHNHYTQKSLSL |
| | | SPGK |
| 1291-3 LC | 111 | MDMRVPAQLLGLLLLWLRGARCDVQLVESGGGLVQPGGSLRLSCTSSANINSIE |
| | | TLGWYRQAPGKQRELIANMRGGGYMKYAGSLKGRFTMSTESAKNTMYLQMNS |
| | | LKPEDTAVYYCYVKLRDDDYVYRGQGTQVTVSSGSGSGDVVMSQSPSSLAVS |
| | | VGEKVTMSCKSSQSLLYSSNQKNYLAWYQQKPGQSPKLLIYWASTRESGVPDR |
| | | FTGSGSGTDFTLTISSVKAKDLAVYYCQQYYSYPTFGGGTKLEIKRTVAAPSVFIF |
| | | PPSDEQLKSGTASVVCLLNNFYPREAKVQWKVDNALQSGNSQESVTEQDSKD |
| | | STYSLSSTLTLSKADYEKHKVYACEVTHQGLSSPVTKSFNRGEC |
| 1291-3 HC | 112 | MDMRVPAQLLGLLLLWLRGARCEVQLVESGGGLVKPGGSLKLSCAASGFTFS |
| | | SYAMSWVRQTPEKRLEWVATISDGGSYTRYPDKLKGRFTISRDNAKNNLYLQ |
| | | MSHLKSEDTAMYYCARVGGRRDYFDYWGQGTTLTVSSASTKGPSVFPLAPSS |
| | | KSTSGGTAALGCLVKDYFPEPVTVSWNSGALTSGVHTFPAVLQSSGLYSLSSV |
| | | VTVPSSSLGTQTYICNVNHKPSNTKVDKKVEPKSCDKTHTCPPCPAPEAAGGP |
| | | SVFLFPPKPKDTLMISRTPEVTCVVVDVSHEDPEVKFNWYVDGVEVHNAKTKP |
| | | REEQYNSTYRVVSVLTVLHQDWLNGKEYKCKVSNKALGAPIEKTISKAKGQPR |
| | | EPQVYTLPPSREEMTKNQVSLTCLVKGFYPSDIAVEWESNGQPENNYKTTPPV |
| | | LDSDGSFFLYSKLTVDKSRWQQGNVFSCSVMHEALHNHYTQKSLSLSPGK |
| 1791-3 LC | 113 | MDMRVPAQLLGLLLLWLRGARCDVQLVESGGGLVQPGGSLRLSCTSSANINSIE |
| | | TLGWYRQAPGKQRELIANMRGGGYMKYAGSLKGRFTMSTESAKNTMYLQMNS |
| | | LKPEDTAVYYCYVKLRDDDYVYRGQGTQVTVSSGSGSGDIVMTQSPKSMSMS |
| | | VGERVTLRCKASENVLNYVSWYQQKPEQSPKLLIYGASNRYTGVPDRFTGSGS |
| | | ATDFTLTISSVQAEDLADYHCGQSYRYPTFGAGTKLELKRTVAAPSVFIFPPSDE |
| | | QLKSGTASVVCLLNNFYPREAKVQWKVDNALQSGNSQESVTEQDSKDSTYSLS |
| | | STLTLSKADYEKHKVYACEVTHQGLSSPVTKSFNRGEC |
| 1791-3 HC | 114 | MDMRVPAQLLGLLLLWLRGARCEVQPVESGGGLVQPKGSLKLSCAASGFTFN |
| | | TYAMHWVRQAPGKGLEWVARIRSKSNNYAKNYDDSVKDRFTISRDDSQSMLY |
| | | LQMNNLKTEDTAMYYCVRENYGGRFDYWGQGTTLTVSSASTKGPSVFPLAPS |
| | | SKSTSGGTAALGCLVKDYFPEPVTVSWNSGALTSGVHTFPAVLQSSGLYSLSS |
| | | VVTVPSSSLGTQTYICNVNHKPSNTKVDKKVEPKSCDKTHTCPPCPAPEAAGG |
| | | PSVFLFPPKPKDTLMISRTPEVTCVVVDVSHEDPEVKFNWYVDGVEVHNAKTK |
| | | PREEQYNSTYRVVSVLTVLHQDWLNGKEYKCKVSNKALGAPIEKTISKAKGQP |
| | | REPQVYTLPPSREEMTKNQVSLTCLVKGFYPSDIAVEWESNGQPENNYKTTPP |
| | | VLDSDGSFFLYSKLTVDKSRWQQGNVFSCSVMHEALHNHYTQKSLSLSPGK |
| 4SD1-3 LC | 115 | MDMRVPAQLLGLLLLWLRGARCDVQLVESGGGLVQPGGSLRLSCTSSANINSIE |
| | | TLGWYRQAPGKQRELIANMRGGGYMKYAGSLKGRFTMSTESAKNTMYLQMNS |
| | | LKPEDTAVYYCYVKLRDDDYVYRGQGTQVTVSSGSGSGDIQMTQSPSSLSASV |
| | | GDRVTITCRASQSISSYLNWYQQKPGKAPKLLIYAASSLQSGVPSRFSGSGSGT |
| | | DFTLTISSLQPEDFATYYCQQSYSTPLTFGGGTKVEIKRTVAAPSVFIFPPSDEQL |
| | | KSGTASVVCLLNNFYPREAKVQWKVDNALQSGNSQESVTEQDSKDSTYSLSST |
| | | LTLSKADYEKHKVYACEVTHQGLSSPVTKSFNRGEC |
| 4SD1-3HC | 116 | MDMRVPAQLLGLLLLWLRGARCEVQLVESGGGLVKPGGSLRLSCAASGFTFT |
| | | NYAMSWVRQAPGKGLEWVSAISGSGGSTYYADSVKGRFTISRDDSKNTLYLQ |
| | | MNSLKTEDTAVYYCARATGFGTVVFDYWGQGTLVTVSSASTKGPSVFPLAPS |
| | | SKSTSGGTAALGCLVKDYFPEPVTVSWNSGALTSGVHTFPAVLQSSGLYSLSS |
| | | VVTVPSSSLGTQTYICNVNHKPSNTKVDKKVEPKSCDKTHTCPPCPAPEAAGG |
| | | PSVFLFPPKPKDTLMISRTPEVTCVVVDVSHEDPEVKFNWYVDGVEVHNAKTK |
| | | PREEQYNSTYRVVSVLTVLHQDWLNGKEYKCKVSNKALGAPIEKTISKAKGQP |
| | | REPQVYTLPPSREEMTKNQVSLTCLVKGFYPSDIAVEWESNGQPENNYKTTPP |
| | | VLDSDGSFFLYSKLTVDKSRWQQGNVFSCSVMHEALHNHYTQKSLSLSPGK |
| 14SB6-3 LC | 117 | MDMRVPAQLLGLLLLWLRGARCDVQLVESGGGLVQPGGSLRLSCTSSANINSIE |
| | | TLGWYRQAPGKQRELIANMRGGGYMKYAGSLKGRFTMSTESAKNTMYLQMNS |
| | | LKPEDTAVYYCYVKLRDDDYVYRGQGTQVTVSSGSGSGDIQMTQSPSSLSASV |
| | | GDRVTITCRASQSISSYLNWYQQKPGKAPKLLIYAASSLQSGVPSRFSGSGSGT |
| | | DFTLTISSLQPEDFATYYCQQSYSTPLTFGGGTKVEIKRTVAAPSVFIFPPSDEQL |
| | | KSGTASVVCLLNNFYPREAKVQWKVDNALQSGNSQESVTEQDSKDSTYSLSST |
| | | LTLSKADYEKHKVYACEVTHQGLSSPVTKSFNRGEC |
| 14SB6-3 HC | 118 | MDMRVPAQLLGLLLLWLRGARCEVQLVQSGGGLVKPGGSLRLSCAASGFTFS |
| | | SYSMNWVRQAPGKGLEWVSYIENDGSITTYADSVKGRFTISRDDSKNTLYLQM |
| | | NSLKTEDTAVYYCARAPYYYGSGSLFRLDYWGQGTLVTVSSASTKGPSVFPL |
| | | APSSKSTSGGTAALGCLVKDYFPEPVTVSWNSGALTSGVHTFPAVLQSSGLY |
| | | SLSSVVTVPSSSLGTQTYICNVNHKPSNTKVDKKVEPKSCDKTHTCPPCPAPE |
| | | AAGGPSVFLFPPKPKDTLMISRTPEVTCVVVDVSHEDPEVKFNWYVDGVEVHN |
| | | AKTKPREEQYNSTYRVVSVLTVLHQDWLNGKEYKCKVSNKALGAPIEKTISKA |
| | | KGQPREPQVYTLPPSREEMTKNQVSLTCLVKGFYPSDIAVEWESNGQPENNY |
| | | KTTPPVLDSDGSFFLYSKLTVDKSRWQQGNVFSCSVMHEALHNHYTQKSLSL |
| | | SPGK |
| 4SD1-3 LC | 119 | MDMRVPAQLLGLLLLWLRGARCDVQLVESGGGLVQPGGSLRLSCTSSANINSIE |
| | | TLGWYRQAPGKQRELIANMRGGGYMKYAGSLKGRFTMSTESAKNTMYLQMNS |
| | | LKPEDTAVYYCYVKLRDDDYVYRGQGTQVTVSSGSGSGDIQMTQSPSSLSASV |
| | | GDRVTITCRASQSISSYLNWYQQKPGKAPKLLIYAASSLQSGVPSRFSGSGSGT |
| | | DFTLTISSLQPEDFATYYCQQSYSTPLTFGGGTKVEIKRTVAAPSVFIFPPSDEQL |
| | | KSGTASVVCLLNNFYPREAKVQWKVDNALQSGNSQESVTEQDSKDSTYSLSST |
| | | LTLSKADYEKHKVYACEVTHQGLSSPVTKSFNRGEC |
| 4SD1-3 HC- | 120 | MDMRVPAQLLGLLLLWLRGARCEVQLVESGGGLVKPGGSLRLSCAASGFTFT |
| holes | | NYAMSWVRQAPGKGLEWVSAISGSGGSTYYADSVKGRFTISRDDSKNTLYLQ |
| | | MNSLKTEDTAVYYCARATGFGTVVFDYWGQGTLVTVSSASTKGPSVFPLAPS |
| | | SKSTSGGTAALGCLVKDYFPEPVTVSWNSGALTSGVHTFPAVLQSSGLYSLSS |
| | | VVTVPSSSLGTQTYICNVNHKPSNTKVDKKVEPKSCDKTHTCPPCPAPEAAGG |
| | | PSVFLFPPKPKDTLMISRTPEVTCVVVDVSHEDPEVKFNWYVDGVEVHNAKTK |
| | | PREEQYNSTYRVVSVLTVLHQDWLNGKEYKCKVSNKALGAPIEKTISKAKGQP |
| | | REPQVYTLPPSREEMTKNQVSLSCAVKGFYPSDIAVEWESNGQPENNYKTTPP |
| | | VLDSDGSFFLVSKLTVDKSRWQQGNVFSCSVMHEALHNHYTQKSLSLSPGKG |
| | | SGSGHHHHHH |
| 14SB6-3 LC | 121 | MDMRVPAQLLGLLLLWLRGARCDVQLVESGGGLVQPGGSLRLSCTSSANINSIE |
| | | TLGWYRQAPGKQRELIANMRGGGYMKYAGSLKGRFTMSTESAKNTMYLQMNS |
| | | LKPEDTAVYYCYVKLRDDDYVYRGQGTQVTVSSGSGSGDIQMTQSPSSLSASV |
| | | GDRVTITCRASQSISSYLNWYQQKPGKAPKLLIYAASSLQSGVPSRFSGSGSGT |
| | | DFTLTISSLQPEDFATYYCQQSYSTPLTFGGGTKVEIKRTVAAPSVFIFPPSDEQL |
| | | KSGTASVVCLLNNFYPREAKVQWKVDNALQSGNSQESVTEQDSKDSTYSLSST |
| | | LTLSKADYEKHKVYACEVTHQGLSSPVTKSFNRGEC |
| 14SB6-3 | 122 | MDMRVPAQLLGLLLLWLRGARCEVQLVQSGGGLVKPGGSLRLSCAASGFTFS |
| HC-knobs | | SYSMNWVRQAPGKGLEWVSYIENDGSITTYADSVKGRFTISRDDSKNTLYLQM |
| | | NSLKTEDTAVYYCARAPYYYGSGSLFRLDYWGQGTLVTVSSASTKGPSVFPL |
| | | APSSKSTSGGTAALGCLVKDYFPEPVTVSWNSGALTSGVHTFPAVLQSSGLY |
| | | SLSSVVTVPSSSLGTQTYICNVNHKPSNTKVDKKVEPKSCDKTHTCPPCPAPE |
| | | AAGGPSVFLFPPKPKDTLMISRTPEVTCVVVDVSHEDPEVKFNWYVDGVEVHN |
| | | AKTKPREEQYNSTYRVVSVLTVLHQDWLNGKEYKCKVSNKALGAPIEKTISKA |
| | | KGQPREPQVYTLPPSREEMTKNQVSLWCLVKGFYPSDIAVEWESNGQPENNY |
| | | KTTPPVLDSDGSFFLYSKLTVDKSRWQQGNVFSCSVMHEALHNHYTQKSLSL |
| | | SPGKGGSGGDYKDDDDK |
| Fc-knobs | 123 | MDMRVPAQLLGLLLLWLRGARCEFDKTHTCPPCPAPEAAGGPSVFLFPPKPKD |
| | | TLMISRTPEVTCVVVDVSHEDPEVKFNWYVDGVEVHNAKTKPREEQYNSTYRV |
| | | VSVLTVLHQDWLNGKEYKCKVSNKALGAPIEKTISKAKGQPREPQVYTLPPSRE |
| | | EMTKNQVSLWCLVKGFYPSDIAVEWESNGQPENNYKTTPPVLDSDGSFFLYSK |
| | | LTVDKSRWQQGNVFSCSVMHEALHNHYTQKSLSLSPGKGGSGGDYKDDDDK |
| Fc-holes | 124 | MDMRVPAQLLGLLLLWLRGARCEFDKTHTCPPCPAPEAAGGPSVFLFPPKPKD |
| | | TLMISRTPEVTCVVVDVSHEDPEVKFNWYVDGVEVHNAKTKPREEQYNSTYRV |
| | | VSVLTVLHQDWLNGKEYKCKVSNKALGAPIEKTISKAKGQPREPQVYTLPPSRE |
| | | EMTKNQVSLSCAVKGFYPSDIAVEWESNGQPENNYKTTPPVLDSDGSFFLVSKL |
| | | TVDKSRWQQGNVFSCSVMHEALHNHYTQKSLSLSPGKGSGSGHHHHHH |
| 4SC10-3 LC | 125 | MDMRVPAQLLGLLLLWLRGARC [symbol] [symbol] |
| | | [symbol] [symbol] [symbol] |
| | | [symbol] [symbol] GGSGSDIQMTQSPSSLS |
| | | ASVGDRVTITCRASQSISSYLNWYQQKPGKAPKLLIYAASSLQSGVPSRFSGSG |
| | | SGTDFTLTISSLQPEDFATYYCQQSYSTPLTFGGGTKVEIKRTVAAPSVFIFPPSD |
| | | EQLKSGTASVVCLLNNFYPREAKVQWKVDNALQSGNSQESVTEQDSKDSTYSL |
| | | SSTLTLSKADYEKHKVYACEVTHQGLSSPVTKSFNRGEC |
| 4SC10-3 | 126 | MDMRMRPAQLLGLLLLWLRGARCQVQLVQSGAEVKKPGASVKVSCKASGYIFT |
| HC | | DYYMHWVRQAPGQGLEWMGLVDPEDGETIYAEKFQGRVTMTRDTSTSTVYM |
| | | ELSSLRSEDTAVYYCAHSDFFSGLSFGDWGQGTLVTVSSASTKGPSVFPLAPS |
| | | SKSTSGGTAALGCLVKDYFPEPVTVSWNSGALTSGVHTFPAVLQSSGLYSLSS |
| | | VVTVPSSSLGTQTYICNVNHKPSNTKVDKKVEPKSCDKTHTCPPCPAPEAAGG |
| | | PSVFLFPPKPKDTLMISRTPEVTCVVVDVSHEDPEVKFNWYVDGVEVHNAKTK |
| | | PREEQYNSTYRVVSVLTVLHQDWLNGKEYKCKVSNKALGAPIEKTISKAKGQP |
| | | REPQVYTLPPSREEMTKNQVSLTCLVKGFYPSDIAVEWESNGQPENNYKTTPP |
| | | VLDSDGSFFLYSKLTVDKSRWQQGNVFSCSVMHEALHNHYTQKSLSLSPGK |
| heterolg | 127 | MDMRVPAQLLGLLLLWLRGARCDVQLVESGGGLVQPGGSLRLSCTSSANINSIE |
| 4SC10- | | TLGWYRQAPGKQRELIANMRGGGYMKYAGSLKGRFTMSTESAKNTMYLQMNS |
| 3 + 1RC07-3 | | LKPEDTAVYYCYVKLRDDDYVYRGQGTQVTVSSGGSGSDIQMTQSPSSLSASV |
| LC1 | | GDRVTITCRASQSISSYLNWYQKKPGKKPKLLIYAASSLQSGVPSRFSGSGSGT |
| | | DFTLTISSLQPEDFATYYCQQSYSTPLTFGGGTKVEIKRTVAAPSVFIFPPSDEQL |
| | | KSGTASVVCLLNNFYPREAKVQWKVDNALQSGNSQESVTEQDSKDSTYSLEST |
| | | LTLSKADYEKHKVYACEVTHQGLSSPVTKSFNRGEC |
| heterolg | 128 | MDMRVPAQLLGLLLLWLRGARCQVQLVQSGAEVKKPGASVKVSCKASGYIFT |
| 4SC10- | | DYYMHWVRDAPGQGLEWMGLVDPEDGETIYAEKFQGRVTMTRDTSTSTVYM |
| 3 + 1RC07-3 | | ELSSLRSEDTAVYYCAHSDFFSGLSFGDWGDGTLVTVSSASTKGPSVFPLAPS |
| HC1 | | SKSTSGGTAALGCLVKDYFPEPVTVSWNSGALTSGVHTFPAVLQSSGLYSLKS |
| | | VVTVPSSSLGTQTYICNVNHKPSNTKVDKKVEPKSCDKTHTCPPCPAPEAAGG |
| | | PSVFLFPPKPKDTLMISRTPEVTCVVVDVSHEDPEVKFNWYVDGVEVHNAKTK |
| | | PREEQYNSTYRVVSVLTVLHQDWLNGKEYKCKVSNKALGAPIEKTISKAKGQP |
| | | REPQVYTLPPSREEMTKNQVSLSCAVKGFYPSDIAVEWESNGQPENNYKTTPP |
| | | VLDSDGSFFLVSKLTVDKSRWQQGNVFSCSVMHEALHNHYTQKSLSLSPGKG |
| | | SGSGHHHHHH |
| heterolg | 129 | MDMRVPAQLLGLLLLWLRGARCDVQLVESGGGLVQPGGSLRLSCTSSANINSIE |
| 4SC10- | | TLGWYRQAPGKQRELIANMRGGGYMKYAGSLKGRFTMSTESAKNTMYLQMNS |
| 3 + 1RC07-3 | | LKPEDTAVYYCYVKLRDDDYVYRGQGTQVTVSSGSGSGSYVLTQPPSVSVSPG |
| LC2 | | QTASITCSGDKVGHKYASWYQDKPGQDPVLVIYEDSQRPSGIPVRFSGSNSGN |
| | | TATLTISGTQAMDEADYYCQAWDSSTDVVFGGGTKLTVLGQPKAAPSVTLFPPS |
| | | SEELQANKATLVCLISDFYPGAVTVAWKADSSPVKAGVETTTPSKQSNNKYAAK |
| | | SYLSLTPEQWKSHRSYSCQVTHEGSTVEKTVAPTECS |
| heterolg | 130 | MDMRVPAQLLGLLLLWLRGARCQVQLQQWGAGLLKPSETLSLTCAVSGASFS |
| 4SC10- | | GHYWTWIRKPPGKGLEWIGEIDHTGSTNYEPSLRSRVTISVDTSKNQFSLNLKS |
| 3 + 1RC07-3 | | VTAADTAVYYCARGGQGGYDWGHYHGLDVWGKGTTVTVSSASTKGPSVFPL |
| HC2 | | APSSKSTSGGTAALGCLVKDYFPEPVTVSWNSGALTSGVHTFPAVLQSSGLY |
| | | SLESVVTVPSSSLGTQTYICNVNHKPSNTKVDKKVEPKSCDKTHTCPPCPAPE |
| | | AAGGPSVFLFPPKPKDTLMISRTPEVTCVVVDVSHEDPEVKFNWYVDGVEVHN |
| | | AKTKPREEQYNSTYRVVSVLTVLHQDWLNGKEYKCKVSNKALGAPIEKTISKA |
| | | KGQPREPQVYTLPPSREEMTKNQVSLWCLVKGFYPSDIAVEWESNGQPENNY |
| | | KTTPPVLDSDGSFFLYSKLTVDKSRWQQGNVFSCSVMHEALHNHYTQKSLSL |
| | | SPGKGGSGGDYKDDDDK |
| 1RC07-3 | 129 | MDMRVPAQLLGLLLLWLRGARCDVQLVESGGGLVQPGGSLRLSCTSSANINSIE |
| monovalent | | TLGWYRQAPGKQRELIANMRGGGYMKYAGSLKGRFTMSTESAKNTMYLQMNS |
| bispecific | | LKPEDTAVYYCYVKLRDDDYVYRGQGTQVTVSSGSGSGSYVLTQPPSVSVSPG |
| LC1 | | QTASITCSGDKVGHKYASWYQDKPGQDPVLVIYEDSQRPSGIPVRFSGSNSGN |
| | | TATLTISGTQAMDEADYYCQAWDSSTDVVFGGGTKLTVLGQPKAAPSVTLFPPS |
| | | SEELQANKATLVCLISDFYPGAVTVAWKADSSPVKAGVETTTPSKQSNNKYAAK |
| | | SYLSLTPEQWKSHRSYSCQVTHEGSTVEKTVAPTECS |
| 1RC07-3 | 130 | MDMRVPAQLLGLLLLWLRGARCQVQLQQWGAGLLKPSETLSLTCAVSGASFS |
| monovalent | | GHYWTWIRKPPGKGLEWIGEIDHTGSTNYEPSLRSRVTISVDTSKNQFSLNLKS |
| bispecific | | VTAADTAVYYCARGGQGGYDWGHYHGLDVWGKGTTVTVSSASTKGPSVFPL |
| HC | | APSSKSTSGGTAALGCLVKDYFPEPVTVSWNSGALTSGVHTFPAVLQSSGLY |
| | | SLESVVTVPSSSLGTQTYICNVNHKPSNTKVDKKVEPKSCDKTHTCPPCPAPE |
| | | AAGGPSVFLFPPKPKDTLMISRTPEVTCVVVDVSHEDPEVKFNWYVDGVEVHN |
| | | AKTKPREEQYNSTYRVVSVLTVLHQDWLNGKEYKCKVSNKALGAPIEKTISKA |
| | | KGQPREPQVYTLPPSREEMTKNQVSLWCLVKGFYPSDIAVEWESNGQPENNY |
| | | KTTPPVLDSDGSFFLYSKLTVDKSRWQQGNVFSCSVMHEALHNHYTQKSLSL |
| | | SPGKGGSGGDYKDDDDK |
| 1RC07-3 | 131 | MDMRVPAQLLGLLLLWLRGARCEFDKTHTCPPCPAPEAAGGPSVFLFPPKPKD |
| monovalent | | TLMISRTPEVTCVVVDVSHEDPEVKFNWYVDGVEVHNAKTKPREEQYNSTYRV |
| bispecific Fc | | VSVLTVLHQDWLNGKEYKCKVSNKALGAPIEKTISKAKGQPREPQVYTLPPSR |
| | | EEMTKNQVSLSCAVKGFYPSDIAVEWESNGQPENNYKTTPPVLDSDGSFFLVS |
| | | KLTVDKSRWQQGNVFSCSVMHEALHNHYTQKSLSLSPGKGSGSGHHHHHH |
| R2M3-26 | 132 | MDMRVPAQLLGLLLLWLRGARCDVQLVESGGGLVQAGGSLRLACAGSGRIFAI |
| LC | | YDIAWYRHPPGNQRELVAMIRPVVTEIDYADSVKGRFTISRNNAMKTVYLQMNN |
| | | LKPEDTAVYYCNAKRPWGSRDEYWGQGTQVTVSSGSGSGQAVVLQEPSLSVS |
| | | PGGTVTLTCGLSSGSVSTNYYPSWYQQTPGQAPRTLIYYTNTRSSDVPERFSG |
| | | SIVGNKAALTITGAQPDDESVYFCLLYLGRGIWVFGGGTKLTVLGQPKAAPSVTL |
| | | FPPSSEELQANKATLVCLISDFYPGAVTVAWKADSSPVKAGVETTTPSKQSNNK |
| | | YAASSYLSLTPEQWKSHRSYSCQVTHEGSTVEKTVAPTECS |
| R2M3-26 | 110 | MDMRVPAQLLGLLLLWLRGARCEVQLVQSGAEVKKPGASVKVSCKASGYTFT |
| HC | | SYGISWVRQAPGQGLEWMGWISAYNGNTIMYAQKLQGRVTMTTDTSTSTAYM |
| | | ELRSLRSDDTAVYYCASSKEKATYYYGMDVWGQGTTVTVSSASTKGPSVFPL |
| | | APSSKSTSGGTAALGCLVKDYFPEPVTVSWNSGALTSGVHTFPAVLQSSGLY |
| | | SLSSVVTVPSSSLGTQTYICNVNHKPSNTKVDKKVEPKSCDKTHTCPPCPAPE |
| | | AAGGPSVFLFPPKPKDTLMISRTPEVTCVVVDVSHEDPEVKFNWYVDGVEVHN |
| | | AKTKPREEQYNSTYRVVSVLTVLHQDWLNGKEYKCKVSNKALGAPIEKTISKA |
| | | KGQPREPQVYTLPPSREEMTKNQVSLTCLVKGFYPSDIAVEWESNGQPENNY |
| | | KTTPPVLDSDGSFFLYSKLTVDKSRWQQGNVFSCSVMHEALHNHYTQKSLSL |
| | | SPGK |
| R2M3mut- | 132 | MDMRVPAQLLGLLLLWLRGARCDVQLVESGGGLVQAGGSLRLACAGSGRIFAI |
| 26 LC | | YDIAWYRHPPGNQRELVAMIRPVVTEIDYADSVKGRFTISRNNAMKTVYLQMNN |
| | | LKPEDTAVYYCNAKRPWGSRDEYWGQGTQVTVSSGSGSGQAVVLQEPSLSVS |
| | | PGGTVTLTCGLSSGSVSTNYYPSWYQQTPGQAPRTLIYYTNTRSSDVPERFSG |
| | | SIVGNKAALTITGAQPDDESVYFCLLYLGRGIWVFGGGTKLTVLGQPKAAPSVTL |
| | | FPPSSEELQANKATLVCLISDFYPGAVTVAWKADSSPVKAGVETTTPSKQSNNK |
| | | YAASSYLSLTPEQWKSHRSYSCQVTHEGSTVEKTVAPTECS |
| R2M3mut- | 133 | MDMRVPAQLLGLLLLWNLRGARCEVQLVQSGAEVKKPGASVKVSCKASGYTFT |
| 26 HC | | SYGISWVRQAPGQGLEWMGWISAYNGNTNYAQKLQGRVTMTTDTSTSTAYM |
| | | ELRSLRSDDTAVYYCASSKEKATYYAGMDVWGQGTTVTVSSASTKGPSVFPL |
| | | APSSKSTSGGTAALGCLVKDYFPEPVTVSWNSGALTSGVHTFPAVLQSSGLY |
| | | SLSSVVTVPSSSLGTQTYICNVNHKPSNTKVDKKVEPKSCDKTHTCPPCPAPE |
| | | AAGGPSVFLFPPKPKDTLMISRTPEVTCVVVDVSHEDPEVKFNWYVDGVEVHN |
| | | AKTKPREEQYNSTYRVVSVLTVLHQDWLNGKEYKCKVSNKALGAPIEKTISKA |
| | | KGQPREPQVYTLPPSREEMTKNQVSLTCLVKGFYPSDIAVEWESNGQPENNY |
| | | KTTPPVLDSDGSFFLYSKLTVDKSRWQQGNVFSCSVMHEALHNHYTQKSLSL |
| | | SPGKGSGSGHHHHHH |
| R2M3-3 LC | 109 | MDMRVPAQLLGLLLLWLRGARCDVQLVESGGGLVQPGGSLRLSCTSSANINSIE |
| | | TLGWYRQAPGKQRELIANMRGGGYMKYAGSLKGRFTMSTESAKNTMYLQMNS |
| | | LKPEDTAVYYCYVKLRDDDYVYRGQGTQVTVSSGSGSGQAVVLQEPSLSVSPG |
| | | GTVTLTCGLSSGSVSTNYYPSWYQQTPGQAPRTLIYYTNTRSSDVPERFSGSIV |
| | | GNKAALTITGAQPDDESVYFCLLYLGRGIWVFGGGTKLTVLGQPKAAPSVTLFP |
| | | PSSEELQANKATLVCLISDFYPGAVTVAWKADSSPVKAGVETTTPSKQSNNKYA |
| | | ASSYLSLTPEQWKSHRSYSCQVTHEGSTVEKTVAPTECS |
| R2M3-3 HC | 110 | MDMRVPAQLLGLLLWLRGARCEVQLVQSGAEVKKPGASVKVSCKASGYTFT |
| | | SYGISWVRQAPGQGLEWMGWISAYNGNTNYAQKLQGRVTMTTDTSTSTAYM |
| | | ELRSLRSDDTAVYYCASSKEKATYYYGMDVWGQGTTVTVSSASTKGPSVFPL |
| | | APSSKSTSGGTAALGCLVKDYFPEPVTVSWNSGALTSGVHTFPAVLQSSGLY |
| | | SLSSVVTVPSSSLGTQTYICNVNHKPSNTKVDKKVEPKSCDKTHTCPPCPAPE |
| | | AAGGPSVFLFPPKPKDTLMISRTPEVTCVVVDVSHEDPEVKFNWYVDGVEVHN |
| | | AKTKPREEQYNSTYRVVSVLTVLHQDWLNGKEYKCKVSNKALGAPIEKTISKA |
| | | KGQPREPQVYTLPPSREEMTKNQVSLTCLVKGFYPSDIAVEWESNGQPENNY |
| | | KTTPPVLDSDGSFFLYSKLTVDKSRWQQGNVFSCSVMHEALHNHYTQKSLSL |
| | | SPGK |
| R2M3mut-3 | 109 | MDMRVPAQLLGLLLLWLRGARCDVQLVESGGGLVQPGGSLRLSCTSSANINSIE |
| LC | | TLGWYRQAPGKQRELIANMRGGGYMKYAGSLKGRFTMSTESAKNTMYLQMNS |
| | | LKPEDTAVYYCYVKLRDDDYVYRGQGTQVTVSSGSGSGQAVVLQEPSLSVSPG |
| | | GTVTLTCGLSSGSVSTNYYPSWYQQTPGQAPRTLIYYTNTRSSDVPERFSGSIV |
| | | GNKAALTITGAQPDDESVYFCLLYLGRGIWVFGGGTKLTVLGQPKAAPSVTLFP |
| | | PSSEELQANKATLVCLISDFYPGAVTVAWKADSSPVKAGVETTTPSKQSNNKYA |
| | | ASSYLSLTPEQWKSHRSYSCQVTHEGSTVEKTVAPTECS |
| R2M3mut-3 | 133 | MDMRVPAQLLGLLLLWLRGARCEVQLVQSGAEVKKPGASVKVSCKASGYTFT |
| HC | | SYGISWVRQAPGQGLEWMGWISAYNGNTNYAQKLQGRVTMTTDTSTSTAYM |
| | | ELRSLRSDDTAVYYCASSKEKATYYAGMDVWGQGTTVTVSSASTKGPSVFPL |
| | | APSSKSTSGGTAALGCLVKDYFPEPVTVSWNSGALTSGVHTFPAVLQSSGLY |
| | | SLSSVVTVPSSSLGTQTYICNVNHKPSNTKVDKKVEPKSCDKTHTCPPCPAPE |
| | | AAGGPSVFLFPPKPKDTLMISRTPEVTCVVVDVSHEDPEVKFNINYVDGVEVHN |
| | | AKTKPREEQYNSTYRVVSVLTVLHQDWLNGKEYKCKVSNKALGAPIEKTISKA |
| | | KGQPREPQVYTLPPSREEMTKNQVSLTCLVKGFYPSDIAVEWESNGQPENNY |
| | | KTTPPVLDSDGSFFLYSKLTVDKSRWQQGNVFSCSVMHEALHNHYTQKSLSL |
| | | SPGKGSGSGHHHHHH |
| 1RC07 3 | 134 | MDMRVPAQLLGLLLLWLRGARCDVQLVESGGGLVQPGGSLRLSCTSSANINSIE |
| (2:2) LC | | TLGWYRQAPGKQRELIANMRGGGYMKYAGSLKGRFTMSTESAKNTMYLQMNS |
| | | LKPEDTAVYYCYVKLRDDDYVYRGQGTQVTVSSGSGSGSYVLTQPPSVSVSPG |
| | | QTASITCSGDKVGHKYASWYQQKPGQSPVLVIYEDSQRPSGIPVRFSGSNSGN |
| | | TATLTISGTQAMDEADYYCQAWDSSTDVVFGGGTKLTVLGQPKAAPSVTLFPPS |
| | | SEELQANKATLVCLISDFYPGAVTVAWKADSSPVKAGVETTTPSKQSNNKYAAS |
| | | SYLSLTPEQWKSHRSYSCQVTHEGSTVEKTVAPTECS |
| 1RC07-3 | 135 | MDMRVPAQLLGLLLLWLRGARCQVQLQQWGAGLLKPSETLSLTCAVSGASFS |
| (2:2) HC | | GHYWTWIRQPPGKGLEWIGEIDHTGSTNYEPSLRSRVTISVDTSKNQFSLNLKS |
| | | VTAADTAVYYCARGGQGGYDWGHYHGLDVWGQGTTVTVSSASTKGPSVFPL |
| | | APSSKSTSGGTAALGCLVKDYFPEPVTVSWNSGALTSGVHTFPAVLQSSGLY |
| | | SLSSVVTVPSSSLGTQTYICNVNHKPSNTKVDKKVEPKSCDKTHTCPPCPAPE |
| | | AAGGPSVFLFPPKPKDTLMISRTPEVTCVVVDVSHEDPEVKFNWYVDGVEVHN |
| | | AKTKPREEQYNSTYRVVSVLTVLHQDWLNGKEYKCKVSNKALGAPIEKTISKA |
| | | KGQPREPQVYTLPPSREEMTKNQVSLTCLVKGFYPSDIAVEWESNGQPENNY |
| | | KTTPPVLDSDGSFFLYSKLTVDKSRWQQGNVFSCSVMHEALHNHYTQKSLSL |
| | | SPGK |
| 1RC07-3 | 129 | MDMRVPAQLLGLLLLWLRGARCDVQLVESGGGLVQPGGSLRLSCTSSANINSIE |
| (2:1) LC1 | | TLGWYRQAPGKQRELIANMRGGGYMKYAGSLKGRFTMSTESAKNTMYLQMNS |
| | | LKPEDTAVYYCYVKLRDDDYVYRGQGTQVTVSSGSGSGSYVLTQPPSVSVSPG |
| | | QTASITCSGDKVGHKYASWYQDKPGQDPVLVIYEDSQRPSGIPVRFSGSNSGN |
| | | TATLTISGTQAMDEADYYCQAWDSSTDVVFGGGTKLTVLGQPKAAPSVTLFPPS |
| | | SEELQANKATLVCLISDFYPGAVTVAWKADSSPVKAGVETTTPSKQSNNKYAAK |
| | | SYLSLTPEQWKSHRSYSCQVTHEGSTVEKTVAPTECS |
| 1RC07-3 | 130 | MDMRVPAQLLGLLLLWLRGARCQVQLQQWGAGLLKPSETLSLTCAVSGASFS |
| (2:1) HC1 | | GHYWTWIRKPPGKGLEWIGEIDHTGSTNYEPSLRSRVTISVDTSKNQFSLNLKS |
| | | VTAADTAVYYCARGGQGGYDWGHYHGLDVWGKGTTVIVSSASTKGPSVFPL |
| | | APSSKSTSGGTAALGCLVKDYFPEPVTVSWNSGALTSGVHTFPAVLQSSGLY |
| | | SLESVVTVPSSSLGTQTYICNVNHKPSNTKVDKKVEPKSCDKTHTCPPCPAPE |
| | | AAGGPSVFLFPPKPKDTLMISRTPEVTCVVVDVSHEDPEVKFNWYVDGVEVHN |
| | | AKTKPREEQYNSTYRVVSVLTVLHQDWLNGKEYKCKVSNKALGAPIEKTISKA |
| | | KGQPREPQVYTLPPSREEMTKNQVSLWCLVKGFYPSDIAVEWESNGQPENNY |
| | | KTTPPVLDSDGSFFLYSKLTVDKSRWQQGNVFSCSVMHEALHNHYTQKSLSL |
| | | SPGKGGSGGDYKDDDDK |
| 1RC07-3 | 136 | MDMRVPAQLLGLLLLWLRGARCSYVLTQPPSVSVSPGQTASITCSGDKVGHKY |
| (2:1) LC2 | | ASWYQKKPGQKPVLVIYEDSQRPSGIPVRFSGSNSGNTATLTISGTQAMDEADY |
| | | YCQAWDSSTDVVFGGGTKLTVLGQPKAAPSVTLFPPSSEELQANKATLVCLISD |
| | | FYPGAVTVAWKADSSPVKAGVETTTPSKQSNNKYAAESYLSLTPEQWKSHRSY |
| | | SCQVTHEGSTVEKTVAPTECS |
| 1RC07-3 | 137 | MDMRVPAQLLGLLLLWLRGARCQVQLQQWGAGLLKPSETLSLTCAVSGASFS |
| (2:1) HC2 | | GHYWTWIRDPPGKGLEWIGEIDHTGSTNYEPSLRSRVTISVDTSKNQFSLNLKS |
| | | VTAADTAVYYCARGGQGGYDWGHYHGLDVWGDGTTVTVSSASTKGPSVFPL |
| | | APSSKSTSGGTAALGCLVKDYFPEPVTVSWNSGALTSGVHTFPAVLQSSGLY |
| | | SLKSVVTVPSSSLGTQTYICNVNHKPSNTKVDKKVEPKSCDKTHTCPPCPAPE |
| | | AAGGPSVFLFPPKPKDTLMISRTPEVTCVVVDVSHEDPEVKFNWYVDGVEVHN |
| | | AKTKPREEQYNSTYRVVSVLTVLHQDWLNGKEYKCKVSNKALGAPIEKTISKA |
| | | KGQPREPQVYTLPPSREEMTKNQVSLSCAVKGFYPSDIAVEWESNGQPENNY |
| | | KTTPPVLDSDGSFFLVSKLTVDKSRWQQGNVFSCSVMHEALHNHYTQKSLSL |
| | | SPGKGSGSGHHHHHH |
| R2M3- | 132 | MDMRVPAQLLGLLLLWLRGARCDVQLVESGGGLVQAGGSLRLACAGSGRIFAI |
| 26NL-26NH | | YDIAWYRHPPGNQRELVAMIRPVVTEIDYADSVKGRFTISRNNAMKTVYLQMNN |
| (1:2) LC | | LKPEDTAVYYCNAKRPWGSRDEYWGQGTQVTVSSGSGSGQAVVLQEPSLSVS |
| | | PGGTVTLTCGLSSGSVSTNYYPSWYQQTPGQAPRTLIYYTNTRSSDVPERFSG |
| | | SIVGNKAALTITGAQPDDESVYFCLLYLGRGIWVFGGGTKLTVLGQPKAAPSVTL |
| | | FPPSSEELQANKATLVCLISDFYPGAVTVAWKADSSPVKAGVETTTPSKQSNNK |
| | | YAASSYLSLTPEQWKSHRSYSCQVTHEGSTVEKTVAPTECS |
| R2M3- | 138 | MDMRVPAQLLGLLLLWLRGARCDVQLVESGGGLVQAGGSLRLACAGSGRIFAI |
| 26NL-26NH | | YDIAWYRHPPGNQRELVAMIRPVVTEIDYADSVKGRFTISRNNAMKTVYLQMNN |
| (1:2) HC | | LKPEDTAVYYCNAKRPWGSRDEYWGQGTQVTVSSGSGSGEVQLVQSGAEVK |
| | | KPGASVKVSCKASGYTFTSYGISWVRQAPGQGLEWMGWISAYNGNTNYAQK |
| | | LQGRVTMTTDTSTSTAYMELRSLRSDDTAVYYCASSKEKATYYYGMDVWGQG |
| | | TTVTVSSASTKGPSVFPLAPSSKSTSGGTAALGCLVKDYFPEPVTVSWNSGAL |
| | | TSGVHTFPAVLQSSGLYSLSSVVTVPSSSLGTQTYICNVNHKPSNTKVDKKVEP |
| | | KSCDKTHTCPPCPAPEAAGGPSVFLFPPKPKDTLMISRTPEVTCVVVDVSHED |
| | | PEVKFNINYVDGVEVHNAKTKPREEQYNSTYRVVSVLTVLHQDWLNGKEYKCK |
| | | VSNKALGAPIEKTISKAKGQPREPQVYTLPPSREEMTKNQVSLWCLVKGFYPS |
| | | DIAVEWESNGQPENNYKTTPPVLDSDGSFFLYSKLTVDKSRWQQGNVFSCSV |
| | | MHEALHNHYTQKSLSLSPGKGGSGGDYKDDDDK |
| R2M3- | 131 | MDMRVPAQLLGLLLLWLRGARCEFDKTHTCPPCPAPEAAGGPSVFLFPPKPKD |
| 26NL-26NH | | TLMISRTPEVTCVVVDVSHEDPEVKFNWYVDGVEVHNAKTKPREEQYNSTYRV |
| (1:2) Fc | | VSVLTVLHQDWLNGKEYKCKVSNKALGAPIEKTISKAKGQPREPQVYTLPPSR |
| | | EEMTKNQVSLSCAVKGFYPSDIAVEWESNGQPENNYKTTPPVLDSDGSFFLVS |
| | | KLTVDKSRWQQGNVFSCSVMHEALHNHYTQKSLSLSPGKGSGSGHHHHHH |
| R2M3- | 139 | MDMRVPAQLLGLLLLWLRGARCDVQLVESGGGLVQAGGSLRLACAGSGRIFAI |
| 26NL-26CL | | YDIAWYRHPPGNQRELVAMIRPVVTEIDYADSVKGRFTISRNNAMKTVYLQMNN |
| (1:2) LC | | LKPEDTAVYYCNAKRPWGSRDEYWGQGTQVTVSSGSGSGQAVVLQEPSLSVS |
| | | PGGTVTLTCGLSSGSVSTNYYPSWYQQTPGQAPRTLIYYTNTRSSDVPERFSG |
| | | SIVGNKAALTITGAQPDDESVYFCLLYLGRGIWVFGGGTKLTVLGQPKAAPSVTL |
| | | FPPSSEELQANKATLVCLISDFYPGAVTVAWKADSSPVKAGVETTTPSKQSNNK |
| | | YAASSYLSLTPEQWKSHRSYSCQVTHEGSTVEKTVAPTECSGSGSGDVQLVES |
| | | GGGLVQAGGSLRLACAGSGRIFAIYDIAWYRHPPGNQRELVAMIRPVVTEIDYA |
| | | DSVKGRFTISRNNAMKTVYLQMNNLKPEDTAVYYCNAKRPWGSRDEYWGQGT |
| | | QVTVSS |
| R2M3- | 140 | MDMRVPAQLLGLLLLWLRGARCEVQLVQSGAEVKKPGASVKVSCKASGYTFT |
| 26NL-26CL | | SYGISWVRQAPGQGLEWMGWISAYNGNTNYAQKLQGRVTMTTDTSTSTAYM |
| (1:2) | | ELRSLRSDDTAVYYCASSKEKATYYYGMDVWGQGTTVTVSSASTKGPSVFPL |
| HC_Fab | | APSSKSTSGGTAALGCLVKDYFPEPVTVSWNSGALTSGVHTFPAVLQSSGLY |
| | | SLSSVVTVPSSSLGTQTYICNVNHKPSNTKVDKKVEPKSCGSGSGHHHHHH |
| R2M3- | 132 | MDMRVPAQLLGLLLLWLRGARCDVQLVESGGGLVQAGGSLRLACAGSGRIFAI |
| 26NL-26CH | | YDIAWYRHPPGNQRELVAMIRPVVTEIDYADSVKGRFTISRNNAMKTVYLQMNN |
| (1:2) LC | | LKPEDTAVYYCNAKRPWGSRDEYWGQGTQVTVSSGSGSGQAVVLQEPSLSVS |
| | | PGGTVTLTCGLSSGSVSTNYYPSWYQQTPGQAPRTLIYYTNTRSSDVPERFSG |
| | | SIVGNKAALTITGAQPDDESVYFCLLYLGRGIWVFGGGTKLTVLGQPKAAPSVTL |
| | | FPPSSEELQANKATLVCLISDFYPGAVTVAWKADSSPVKAGVETTTPSKQSNNK |
| | | YAASSYLSLTPEQWKSHRSYSCQVTHEGSTVEKTVAPTECS |
| R2M3- | 141 | MDMRVPAQLLGLLLLWLRGARCEVQLVQSGAEVKKPGASVKVSCKASGYTFT |
| 26NL-26CH | | SYGISWVRQAPGQGLEWMGWISAYNGNTNYAQKLQGRVTMTTDTSTSTAYM |
| (1:2) HC | | ELRSLRSDDTAVYYCASSKEKATYYYGMDVWGQGTTVTVSSASTKGPSVFPL |
| | | APSSKSTSGGTAALGCLVKDYFPEPVTVSWNSGALTSGVHTFPAVLQSSGLY |
| | | SLSSVVTVPSSSLGTQTYICNVNHKPSNTKVDKKVEPKSCDKTHTCPPCPAPE |
| | | AAGGPSVFLFPPKPKDTLMISRTPEVTCVVVDVSHEDPEVKFNWYVDGVEVHN |
| | | AKTKPREEQYNSTYRVVSVLTVLHQDWLNGKEYKCKVSNKALGAPIEKTISKA |
| | | KGQPREPQVYTLPPSREEMTKNQVSLWCLVKGFYPSDIAVEWESNGQPENNY |
| | | KTTPPVLDSDGSFFLYSKLTVDKSRWQQGNVFSCSVMHEALHNHYTQKSLSL |
| | | SPGKGSGSGDVQLVESGGGLVQAGGSLRLACAGSGRIFAIYDIAWYRHPPGNQ |
| | | RELVAMIRPVVTEIDYADSVKGRFTISRNNAMKTVYLQMNNLKPEDTAVYYCNA |
| | | KRPWGSRDEYWGQGTQVTVSS |
| R2M3- | 131 | MDMRVPAQLLGLLLLWLRGARCEFDKTHTCPPCPAPEAAGGPSVFLFPPKPKD |
| 26NL-26CH | | TLMISRTPEVTCVVVDVSHEDPEVKFNWYVDGVEVHNAKTKPREEQYNSTYRV |
| (1:2) Fc | | VSVLTVLHQDWLNGKEYKCKVSNKALGAPIEKTISKAKGQPREPQVYTLPPSR |
| | | EEMTKNQVSLSCAVKGFYPSDIAVEWESNGQPENNYKTTPPVLDSDGSFFLVS |
| | | KLTVDKSRWQQGNVFSCSVMHEALHNHYTQKSLSLSPGKGSGSGHHHHHH |
| 1RC07- | 129 | MDMRVPAQLLGLLLLWLRGARCDVQLVESGGGLVQPGGSLRLSCTSSANINSIE |
| 3 + R2M3 | | TLGWYRQAPGKQRELIANMRGGGYMKYAGSLKGRFTMSTESAKNTMYLQMNS |
| (1:1:1) LC1 | | LKPEDTAVYYCYVKLRDDDYVYRGQGTQVTVSSGSGSGSYVLTQPPSVSVSPG |
| | | QTASITCSGDKVGHKYASWYQDKPGQDPVLVIYEDSQRPSGIPVRFSGSNSGN |
| | | TATLTISGTQAMDEADYYCQAWDSSTDVVFGGGTKLTVLGQPKAAPSVTLFPPS |
| | | SEELQANKATLVCLISDFYPGAVTVAWKADSSPVKAGVETTTPSKQSNNKYAAK |
| | | SYLSLTPEQWKSHRSYSCQVTHEGSTVEKTVAPTECS |
| 1RC07- | 130 | MDMRVPAQLLGLLLLWLRGARCQVQLQQWGAGLLKPSETLSLTCAVSGASFS |
| 3 + R2M3 | | GHYWTWIRKPPGKGLEWIGEIDHTGSTNYEPSLRSRVTISVDTSKNQFSLNLKS |
| (1:1:1) HC1 | | VTAADTAVYYCARGGQGGYDWGHYHGLDVWGKGTTVTVSSASTKGPSVFPL |
| | | APSSKSTSGGTAALGCLVKDYFPEPVTVSWNSGALTSGVHTFPAVLQSSGLY |
| | | SLESVVTVPSSSLGTQTYICNVNHKPSNTKVDKKVEPKSCDKTHTCPPCPAPE |
| | | AAGGPSVFLFPPKPKDTLMISRTPEVTCVVVDVSHEDPEVKFNWYVDGVEVHN |
| | | AKTKPREEQYNSTYRVVSVLTVLHQDWLNGKEYKCKVSNKALGAPIEKTISKA |
| | | KGQPREPQVYTLPPSREEMTKNQVSLWCLVKGFYPSDIAVEWESNGQPENNY |
| | | KTTPPVLDSDGSFFLYSKLTVDKSRWQQGNVFSCSVMHEALHNHYTQKSLSL |
| | | SPGKGGSGGDYKDDDDK |
| 1RC07- | 142 | MDMRVPAQLLGLLLLWLRGARCQAVVLQEPSLSVSPGGTVTLTCGLSSGSVST |
| 3 + R2M3 | | NYYPSWYQKTPGQKPRTLIYYTNTRSSDVPERFSGSIVGNKAALTITGAQPDDE |
| (1:1:1) LC2 | | SVYFCLLYLGRGIWVFGGGTKLTVLGQPKAAPSVTLFPPSSEELQANKATLVCLI |
| | | SDFYPGAVTVAWKADSSPVKAGVETTTPSKQSNNKYAAESYLSLTPEQWKSHR |
| | | SYSCQVTHEGSTVEKTVAPTECS |
| 1RC07- | 143 | MDMRVPAQLLGLLLLWLRGARCEVQLVQSGAEVKKPGASVKVSCKASGYTFT |
| 3 + R2M3 | | SYGISWVRDAPGQGLEWMGWISAYNGNTNYAQKLQGRVTMTTDTSTSTAYM |
| (1:1:1) HC2 | | ELRSLRSDDTAVYYCASSKEKATYYYGMDVWGDGTTVTVSSASTKGPSVFPL |
| | | APSSKSTSGGTAALGCLVKDYFPEPVTVSWNSGALTSGVHTFPAVLQSSGLY |
| | | SLKSVVTVPSSSLGTQTYICNVNHKPSNTKVDKKVEPKSCDKTHTCPPCPAPE |
| | | AAGGPSVFLFPPKPKDTLMISRTPEVTCVVVDVSHEDPEVKFNWYVDGVEVHN |
| | | AKTKPREEQYNSTYRVVSVLTVLHQDWLNGKEYKCKVSNKALGAPIEKTISKA |
| | | KGQPREPQVYTLPPSREEMTKNQVSLSCAVKGFYPSDIAVEWESNGQPENNY |
| | | KTTPPVLDSDGSFFLVSKLTVDKSRWQQGNVFSCSVMHEALHNHYTQKSLSL |
| | | SPGKGSGSGHHHHHH |
| 1RC07- | 129 | MDMRVPAQLLGLLLLWLRGARCDVQLVESGGGLVQPGGSLRLSCTSSANINSIE |
| 3 + R2M13 | | TLGWYRQAPGKQRELIANMRGGGYMKYAGSLKGRFTMSTESAKNTMYLQMNS |
| (1:1:1) LC1 | | LKPEDTAVYYCYVKLRDDDYVYRGQGTQVTVSSGSGSGSYVLTQPPSVSVSPG |
| | | QTASITCSGDKVGHKYASWYQDKPGQDPVLVIYEDSQRPSGIPVRFSGSNSGN |
| | | TATLTISGTQAMDEADYYCQAWDSSTDVVFGGGTKLTVLGQPKAAPSVTLFPPS |
| | | SEELQANKATLVCLISDFYPGAVTVAWKADSSPVKAGVETTTPSKQSNNKYAAK |
| | | SYLSLTPEQWKSHRSYSCQVTHEGSTVEKTVAPTECS |
| 1RC07- | 130 | MDMRVPAQLLGLLLLWLRGARCQVQLQQWGAGLLKPSETLSLTCAVSGASFS |
| 3 + R2M13 | | GHYWTWIRKPPGKGLEWIGEIDHTGSTNYEPSLRSRVTISVDTSKNQFSLNLKS |
| (1:1:1) HCl | | VTAADTAVYYCARGGQGGYDWGHYHGLDVWGKGTTVTVSSASTKGPSVFPL |
| | | APSSKSTSGGTAALGCLVKDYFPEPVTVSWNSGALTSGVHTFPAVLQSSGLY |
| | | SLESVVTVPSSSLGTQTYICNVNHKPSNTKVDKKVEPKSCDKTHTCPPCPAPE |
| | | AAGGPSVFLFPPKPKDTLMISRTPEVTCVVVDVSHEDPEVKFNWYVDGVEVHN |
| | | AKTKPREEQYNSTYRVVSVLTVLHQDWLNGKEYKCKVSNKALGAPIEKTISKA |
| | | KGQPREPQVYTLPPSREEMTKNQVSLWCLVKGFYPSDIAVEWESNGQPENNY |
| | | KTTPPVLDSDGSFFLYSKLTVDKSRWQQGNVFSCSVMHEALHNHYTQKSLSL |
| | | SPGKGGSGGDYKDDDDK |
| 1RC07- | 144 | MDMRVPAQLLGLLLLWLRGARCDIQMTQSPSSLSASVGDRVTITCRASQSISSY |
| 3 + R2M13 | | LNWYQKKPGKKPKLLIYAASSLQSGVPSRFSGSGSGTDFTLTISSLQPEDFATYY |
| (1:1:1) LC2 | | CQQSYSTPLTFGGGTKVEIKRTVAAPSVFIFPPSDEQLKSGTASVVCLLNNFYPR |
| | | EAKVQWKVDNALQSGNSQESVTEQDSKDSTYSLESTLTLSKADYEKHKVYACE |
| | | VTHQGLSSPVTKSFNRGEC |
| 1RC07- | 145 | MDMRVPAQLLGLLLLWLRGARCEVQLLQSGAEVKKPGSSVKVSCKASGGTFT |
| 3 + R2M13 | | YRYLHWVRDAPGQGLEWMGGIIPIFGTGNYAQKFQGRVTITADESTSTAYMEL |
| (1:1:1) HC2 | | SSLRSEDTAVYYCASSMVRVPYYYGMDVWGDGTLVTVSSASTKGPSVFPLAP |
| | | SSKSTSGGTAALGCLVKDYFPEPVTVSWNSGALTSGVHTFPAVLQSSGLYSLK |
| | | SVVTVPSSSLGTQTYICNVNHKPSNTKVDKKVEPKSCDKTHTCPPCPAPEAAG |
| | | GPSVFLFPPKPKDTLMISRTPEVTCVVVDVSHEDPEVKFNWYVDGVEVHNAKT |
| | | KPREEQYNSTYRVVSVLTVLHQDWLNGKEYKCKVSNKALGAPIEKTISKAKGQ |
| | | PREPQVYTLPPSREEMTKNQVSLSCAVKGFYPSDIAVEWESNGQPENNYKTTP |
| | | PVLDSDGSFFLVSKLTVDKSRWQQGNVFSCSVMHEALHNHYTQKSLSLSPGK |
| | | GSGSGHHHHHH |
| 1RC07- | 129 | MDMRVPAQLLGLLLLWLRGARCDVQLVESGGGLVQPGGSLRLSCTSSANINSIE |
| 3 + 5SH5 | | TLGWYRQAPGKQRELIANMRGGGYMKYAGSLKGRFTMSTESAKNTMYLQMNS |
| (1:1:1) LC1 | | LKPEDTAVYYCYVKLRDDDYVYRGQGTQVTVSSGSGSGSYVLTQPPSVSVSPG |
| | | QTASITCSGDKVGHKYASWYQDKPGQDPVLVIYEDSQRPSGIPVRFSGSNSGN |
| | | TATLTISGTQAMDEADYYCQAWDSSTDVVFGGGTKLTVLGQPKAAPSVTLFPPS |
| | | SEELQANKATLVCLISDFYPGAVTVAWKADSSPVKAGVETTTPSKQSNNKYAAK |
| | | SYLSLTPEQWKSHRSYSCQVTHEGSTVEKTVAPTECS |
| 1RC07- | 130 | MDMRVPAQLLGLLLLWLRGARCQVQLQQWGAGLLKPSETLSLTCAVSGASFS |
| 3 + 5SH5 | | GHYWTWIRKPPGKGLEWIGEIDHTGSTNYEPSLRSRVTISVDTSKNQFSLNLKS |
| (1:1:1) HC1 | | VTAADTAVYYCARGGQGGYDWGHYHGLDVWGKGTTVTVSSASTKGPSVFPL |
| | | APSSKSTSGGTAALGCLVKDYFPEPVTVSWNSGALTSGVHTFPAVLQSSGLY |
| | | SLESVVTVPSSSLGTQTYICNVNHKPSNTKVDKKVEPKSCDKTHTCPPCPAPE |
| | | AAGGPSVFLFPPKPKDTLMISRTPEVTCVVVDVSHEDPEVKFNWYVDGVEVHN |
| | | AKTKPREEQYNSTYRVVSVLTVLHQDWLNGKEYKCKVSNKALGAPIEKTISKA |
| | | KGQPREPQVYTLPPSREEMTKNQVSLWCLVKGFYPSDIAVEWESNGQPENNY |
| | | KTTPPVLDSDGSFFLYSKLTVDKSRWQQGNVFSCSVMHEALHNHYTQKSLSL |
| | | SPGKGGSGGDYKDDDDK |
| 1RC07- | 146 | MDMRVPAQLLGLLLLWNLRGARCDIQMTQSPSSLSASVGDRVTITCRASQGISSA |
| 3 + 5SH5 | | LAWYQKKPGKKPKLLIYAASSLQSGVPSRFSGSGSGTDFTLTISSLQPEDFATYY |
| (1:1:1) LC2 | | CQQTYSMPITFGQGTRLEIKRTVAAPSVFIFPPSDEQLKSGTASVVCLLNNFYPR |
| | | EAKVQWKVDNALQSGNSQESVTEQDSKDSTYSLESTLTLSKADYEKHKVYACE |
| | | VTHQGLSSPVTKSFNRGEC |
| 1RC07- | 147 | MDMRVPAQLLGLLLLWLRGARCQVQLVQSGAEVKKPGASVKVSCKASGYTFT |
| 3 + 5SH5 | | SYYMHWVRDAPGQGLEWMGRINPNSGGTNYAQKFQGRVTMTRDTSTSTVYM |
| (1:1:1) HC2 | | ELSSLRSEDTAVYYCARVPDFWSGYLDYVVGDGTLVTVSSASTKGPSVFPLAP |
| | | SSKSTSGGTAALGCLVKDYFPEPVTVSWNSGALTSGVHTFPAVLQSSGLYSLK |
| | | SVVTVPSSSLGTQTYICNVNHKPSNTKVDKKVEPKSCDKTHTCPPCPAPEAAG |
| | | GPSVFLFPPKPKDTLMISRTPEVTCVVVDVSHEDPEVKFNWYVDGVEVHNAKT |
| | | KPREEQYNSTYRVVSVLTVLHQDWLNGKEYKCKVSNKALGAPIEKTISKAKGQ |
| | | PREPQVYTLPPSREEMTKNQVSLSCAVKGFYPSDIAVEWESNGQPENNYKTTP |
| | | PVLDSDGSFFLVSKLTVDKSRWQQGNVFSCSVMHEALHNHYTQKSLSLSPGK |
| | | GSGSGHHHHHH |
| 1RC07-3-26 | 129 | MDMRVPAQLLGLLLLWLRGARCDVQLVESGGGLVQPGGSLRLSCTSSANINSIE |
| NL (2:1:1) | | TLGWYRQAPGKQRELIANMRGGGYMKYAGSLKGRFTMSTESAKNTMYLQMNS |
| LC1 | | LKPEDTAVYYCYVKLRDDDYVYRGQGTQVTVSSGSGSGSYVLTQPPSVSVSPG |
| | | QTASITCSGDKVGHKYASWYQDKPGQDPVLVIYEDSQRPSGIPVRFSGSNSGN |
| | | TATLTISGTQAMDEADYYCQAWDSSTDVVFGGGTKLTVLGQPKAAPSVTLFPPS |
| | | SEELQANKATLVCLISDFYPGAVTVAWKADSSPVKAGVETTTPSKQSNNKYAAK |
| | | SYLSLTPEQWKSHRSYSCQVTHEGSTVEKTVAPTECS |
| 1RC07-3-26 | 130 | MDMRVPAQLLGLLLLWLRGARCQVQLQQWGAGLLKPSETLSLTCAVSGASFS |
| NL (2:1:1) | | GHYWTWIRKPPGKGLEWIGEIDHTGSTNYEPSLRSRVTISVDTSKNQFSLNLKS |
| HC1 | | VTAADTAVYYCARGGQGGYDWGHYHGLDVWGKGTTVTVSSASTKGPSVFPL |
| | | APSSKSTSGGTAALGCLVKDYFPEPVTVSWNSGALTSGVHTFPAVLQSSGLY |
| | | SLESVVTVPSSSLGTQTYICNVNHKPSNTKVDKKVEPKSCDKTHTCPPCPAPE |
| | | AAGGPSVFLFPPKPKDTLMISRTPEVTCVVVDVSHEDPEVKFNWYVDGVEVHN |
| | | AKTKPREEQYNSTYRVVSVLTVLHQDWLNGKEYKCKVSNKALGAPIEKTISKA |
| | | KGQPREPQVYTLPPSREEMTKNQVSLWCLVKGFYPSDIAVEWESNGQPENNY |
| | | KTTPPVLDSDGSFFLYSKLTVDKSRWQQGNVFSCSVMHEALHNHYTQKSLSL |
| | | SPGKGGSGGDYKDDDDK |
| 1RC07-3-26 | 148 | MDMRVPAQLLGLLLLWLRGARCDVQLVESGGGLVQAGGSLRLACAGSGRIFAI |
| NL (2:1:1) | | YDIAWYRHPPGNQRELVAMIRPVVTEIDYADSVKGRFTISRNNAMKTVYLQMNN |
| LC2 | | LKPEDTAVYYCNAKRPWGSRDEYWGQGTQVTVSSGGSGSSYVLTQPPSVSVS |
| | | PGQTASITCSGDKVGHKYASWYQKKPGQKPVLVIYEDSQRPSGIPVRFSGSNS |
| | | GNTATLTISGTQAMDEADYYCQAWDSSTDVVFGGGTKLTVLGQPKAAPSVTLF |
| | | PPSSEELQANKATLVCLISDFYPGAVTVAWKADSSPVKAGVETTTPSKQSNNKY |
| | | AAESYLSLTPEQWKSHRSYSCQVTHEGSTVEKTVAPTECS |
| 1RC07-3-26 | 137 | MDMRVPAQLLGLLLLWLRGARCQVQLQQWGAGLLKPSETLSLTCAVSGASFS |
| NL (2:1:1) | | GHYWTWIRDPPGKGLEWIGEIDHTGSTNYEPSLRSRVTISVDTSKNQFSLNLKS |
| HC2 | | VTAADTAVYYCARGGQGGYDWGHYHGLDVWGDGTTVTVSSASTKGPSVFPL |
| | | APSSKSTSGGTAALGCLVKDYFPEPVTVSWNSGALTSGVHTFPAVLQSSGLY |
| | | SLKSVVTVPSSSLGTQTYICNVNHKPSNTKVDKKVEPKSCDKTHTCPPCPAPE |
| | | AAGGPSVFLFPPKPKDTLMISRTPEVTCVVVDVSHEDPEVKFNWYVDGVEVHN |
| | | AKTKPREEQYNSTYRVVSVLTVLHQDWLNGKEYKCKVSNKALGAPIEKTISKA |
| | | KGQPREPQVYTLPPSREEMTKNQVSLSCAVKGFYPSDIAVEWESNGQPENNY |
| | | KTTPPVLDSDGSFFLVSKLTVDKSRWQQGNVFSCSVMHEALHNHYTQKSLSL |
| | | SPGKGSGSGHHHHHH |
| 1RC07-3-26 | 149 | MDMRVPAQLLGLLLLWLRGARCSYVLTQPPSVSVSPGQTASITCSGDKVGHKY |
| NH (2:1:1) | | ASWYQQKPGQSPVLVIYEDSQRPSGIPVRFSGSNSGNTATLTISGTQAMDEADY |
| LC | | YCQAWDSSTDVVFGGGTKLTVLGQPKAAPSVTLFPPSSEELQANKATLVCLISD |
| | | FYPGAVTVAWKADSSPVKAGVETTTPSKQSNNKYAASSYLSLTPEQWKSHRSY |
| | | SCQVTHEGSTVEKTVAPTECS |
| 1RC07-3-26 | 150 | MDMRVPAQLLGLLLLWLRGARCDVQLVESGGGLVQAGGSLRLACAGSGRIFAI |
| NH (2:1:1) | | YDIAWYRHPPGNQRELVAMIRPVVTEIDYADSVKGRFTISRNNAMKTVYLQMNN |
| HC1 | | LKPEDTAVYYCNAKRPWGSRDEYWGQGTQVTVSSGGSGSQVQLQQWGAGL |
| | | LKPSETLSLTCAVSGASFSGHYWTWIRQPPGKGLEWIGEIDHTGSTNYEPSLR |
| | | SRVTISVDTSKNQFSLNLKSVTAADTAVYYCARGGQGGYDWGHYHGLDVWG |
| | | QGTTVTVSSASTKGPSVFPLAPSSKSTSGGTAALGCLVKDYFPEPVTVSWNSG |
| | | ALTSGVHTFPAVLQSSGLYSLSSVVTVPSSSLGTQTYICNVNHKPSNTKVDKKV |
| | | EPKSCDKTHTCPPCPAPEAAGGPSVFLFPPKPKDTLMISRTPEVTCVVVDVSH |
| | | EDPEVKFNWYVDGVEVHNAKTKPREEQYNSTYRVVSVLTVLHQDWLNGKEYK |
| | | CKVSNKALGAPIEKTISKAKGQPREPQVYTLPPSREEMTKNQVSLWCLVKGFY |
| | | PSDIAVEWESNGQPENNYKTTPPVLDSDGSFFLYSKLTVDKSRWQQGNVFSC |
| | | SVMHEALHNHYTQKSLSLSPGKGGSGGDYKDDDDK |
| 1RC07-3-26 | 151 | MDMRVPAQLLGLLLLWLRGARCDVQLVESGGGLVQPGGSLRLSCTSSANINSIE |
| NH (2:1:1) | | TLGWYRQAPGKQRELIANMRGGGYMKYAGSLKGRFTMSTESAKNTMYLQMNS |
| HC2 | | LKPEDTAVYYCYVKLRDDDYVYRGQGTQVTVSSGGSGSQVQLQQWGAGLLK |
| | | PSETLSLTCAVSGASFSGHYWTWIRQPPGKGLEWIGEIDHTGSTNYEPSLRSR |
| | | VTISVDTSKNQFSLNLKSVTAADTAVYYCARGGQGGYDWGHYHGLDVWGQG |
| | | TTVTVSSASTKGPSVFPLAPSSKSTSGGTAALGCLVKDYFPEPVTVSWNSGAL |
| | | TSGVHTFPAVLQSSGLYSLSSVVTVPSSSLGTQTYICNVNHKPSNTKVDKKVEP |
| | | KSCDKTHTCPPCPAPEAAGGPSVFLFPPKPKDTLMISRTPEVTCVVVDVSHED |
| | | PEVKFNWYVDGVEVHNAKTKPREEQYNSTYRVVSVLTVLHQDWLNGKEYKCK |
| | | VSNKALGAPIEKTISKAKGQPREPQVYTLPPSREEMTKNQVSLSCAVKGFYPS |
| | | DIAVEWESNGQPENNYKTTPPVLDSDGSFFLVSKLTVDKSRWQQGNVFSCSV |
| | | MHEALHNHYTQKSLSLSPGKGSGSGHHHHHH |
| 1RC07- | 152 | MDMRVPAQLLGLLLLWLRGARCDVQLVESGGGLVQAGGSLRLACAGSGRIFAI |
| 26 + 4SD1- | | YDIAWYRHPPGNQRELVAMIRPVVTEIDYADSVKGRFTISRNNAMKTVYLQMNN |
| 3_(1:1:1:1) | | LKPEDTAVYYCNAKRPWGSRDEYWGQGTQVTVSSGGSGSSYVLTQPPSVSVS |
| LC1 | | PGQTASITCSGDKVGHKYASWYQDKPGQDPVLVIYEDSQRPSGIPVRFSGSNS |
| | | GNTATLTISGTQAMDEADYYCQAWDSSTDVVFGGGTKLTVLGQPKAAPSVTLF |
| | | PPSSEELQANKATLVCLISDFYPGAVTVAWKADSSPVKAGVETTTPSKQSNNKY |
| | | AAKSYLSLTPEQWKSHRSYSCQVTHEGSTVEKTVAPTECS |
| 1RC07- | 130 | MDMRVPAQLLGLLLLWLRGARCQVQLQQWGAGLLKPSETLSLTCAVSGASFS |
| 26 + 4SD1- | | GHYWTWIRKPPGKGLEWIGEIDHTGSTNYEPSLRSRVTISVDTSKNQFSLNLKS |
| 3_(1:1:1:1) | | VTAADTAVYYCARGGQGGYDWGHYHGLDVWGKGTTVTVSSASTKGPSVFPL |
| HC1 | | APSSKSTSGGTAALGCLVKDYFPEPVTVSWNSGALTSGVHTFPAVLQSSGLY |
| | | SLESVVTVPSSSLGTQTYICNVNHKPSNTKVDKKVEPKSCDKTHTCPPCPAPE |
| | | AAGGPSVFLFPPKPKDTLMISRTPEVTCVVVDVSHEDPEVKFNWYVDGVEVHN |
| | | AKTKPREEQYNSTYRVVSVLTVLHQDWLNGKEYKCKVSNKALGAPIEKTISKA |
| | | KGQPREPQVYTLPPSREEMTKNQVSLWCLVKGFYPSDIAVEWESNGQPENNY |
| | | KTTPPVLDSDGSFFLYSKLTVDKSRWQQGNVFSCSVMHEALHNHYTQKSLSL |
| | | SPGKGGSGGDYKDDDDK |
| 1RC07- | 153 | MDMRVPAQLLGLLLLWLRGARCDVQLVESGGGLVQPGGSLRLSCTSSANINSIE |
| 26 + 4SD1- | | TLGWYRQAPGKQRELIANMRGGGYMKYAGSLKGRFTMSTESAKNTMYLQMNS |
| 3_(1:1:1:1) | | LKPEDTAVYYCYVKLRDDDYVYRGQGTQVTVSSGGSGSDIQMTQSPSSLSASV |
| LC2 | | GDRVTITCRASQSISSYLNWYQKKPGKAPKLLIYAASSLQSGVPSRFSGSGSGT |
| | | DFTLTISSLQPEDFATYYCQQSYSTPLTFGGGTKVEIKRTVAAPSVFIFPPSDEQL |
| | | KSGTASVVCLLNNFYPREAKVQWKVDNALQSGNSQESVTEQDSKDSTYSLEST |
| | | LTLSKADYEKHKVYACEVTHQGLSSPVTKSFNRGEC |
| 1RC07- | 154 | MDMRVPAQLLGLLLLWLRGARCEVQLVESGGGLVKPGGSLRLSCAASGFTFT |
| 26 + 4SD1- | | NYAMSWVRDAPGKGLEWVSAISGSGGSTYYADSVKGRFTISRDDSKNTLYLQ |
| 3_(1:1:1:1) | | MNSLKTEDTAVYYCARATGFGTVVFDYVVGDGTLVTVSSASTKGPSVFPLAPS |
| HC2 | | SKSTSGGTAALGCLVKDYFPEPVTVSWNSGALTSGVHTFPAVLQSSGLYSLKS |
| | | VVTVPSSSLGTQTYICNVNHKPSNTKVDKKVEPKSCDKTHTCPPCPAPEAAGG |
| | | PSVFLFPPKPKDTLMISRTPEVTCVVVDVSHEDPEVKFNWYVDGVEVHNAKTK |
| | | PREEQYNSTYRVVSVLTVLHQDWLNGKEYKCKVSNKALGAPIEKTISKAKGQP |
| | | REPQVYTLPPSREEMTKNQVSLSCAVKGFYPSDIAVEWESNGQPENNYKTTPP |
| | | VLDSDGSFFLVSKLTVDKSRWQQGNVFSCSVMHEALHNHYTQKSLSLSPGKG |
| | | SGSGHHHHHH |
| R2M9- | 155 | MDMRVPAQLLGLLLLWLRGARCDVQLVESGGGLVQAGGSLRLACAGSGRIFAI |
| 26 + 1RC07- | | YDIAWYRHPPGNQRELVAMIRPVVTEIDYADSVKGRFTISRNNAMKTVYLQMNN |
| 3(1:1:1:1) | | LKPEDTAVYYCNAKRPWGSRDEYWGQGTQVTVSSGSGSGDIQMTQSPSSLSA |
| LC1 | | SVGDRVTITCRASQSISSYLNWYQDKPGKDPKLLIYAASSLQSGVPSRFSGSGS |
| | | GTDFTLTISSLQPEDFATYYCQQSYRTPFTFGPGTKVDIKRTVAAPSVFIFPPSDE |
| | | QLKSGTASVVCLLNNFYPREAKVQWKVDNALQSGNSQESVTEQDSKDSTYSLK |
| | | STLTLSKADYEKHKVYACEVTHQGLSSPVTKSFNRGEC |
| R2M9- | 156 | MDMRVPAQLLGLLLLWLRGARCQVQLVQSGAEVKKPGSSVKVSCKASGYTFT |
| 26 + 1RC07- | | NNFMHWVRKAPGQGLEWMGWINPNSGGTKYAQKFQGRVTITADESTSTAYM |
| 3(1:1:1:1) | | ELSSLRSEDTAVYYCARSVGEVGATMLGIGVWYWFDPWGKGTLVTVSSASTK |
| HC1 | | GPSVFPLAPSSKSTSGGTAALGCLVKDYFPEPVTVSWNSGALTSGVHTFPAVL |
| | | QSSGLYSLESVVTVPSSSLGTQTYICNVNHKPSNTKVDKKVEPKSCDKTHTCP |
| | | PCPAPEAAGGPSVFLFPPKPKDTLMISRTPEVTCVVVDVSHEDPEVKFNWYVD |
| | | GVEVHNAKTKPREEQYNSTYRVVSVLTVLHQDWLNGKEYKCKVSNKALGAPI |
| | | EKTISKAKGQPREPQVYTLPPSREEMTKNQVSLWCLVKGFYPSDIAVEWESNG |
| | | QPENNYKTTPPVLDSDGSFFLYSKLTVDKSRWQQGNVFSCSVMHEALHNHYT |
| | | QKSLSLSPGKGGSGGDYKDDDDK |
| R2M9- | 157 | MDMRVPAQLLGLLLLWLRGARCDVQLVESGGGLVQPGGSLRLSCTSSANINSIE |
| 26 + 1RC07- | | TLGWYRQAPGKQRELIANMRGGGYMKYAGSLKGRFTMSTESAKNTMYLQMNS |
| 3(1:1:1:1) | | LKPEDTAVYYCYVKLRDDDYVYRGQGTQVTVSSGGSGSSYVLTQPPSVSVSPG |
| LC2 | | QTASITCSGDKVGHKYASWYQKKPGQKPVLVIYEDSQRPSGIPVRFSGSNSGN |
| | | TATLTISGTQAMDEADYYCQAWDSSTDVVFGGGTKLTVLGQPKAAPSVTLFPPS |
| | | SEELQANKATLVCLISDFYPGAVTVAWKADSSPVKAGVETTTPSKQSNNKYAAE |
| | | SYLSLTPEQWKSHRSYSCQVTHEGSTVEKTVAPTECS |
| R2M9- | 130 | MDMRVPAQLLGLLLLWLRGARCQVQLQQWGAGLLKPSETLSLTCAVSGASFS |
| 26 + 1RC07- | | GHYWTWIRKPPGKGLEWIGEIDHTGSTNYEPSLRSRVTISVDTSKNQFSLNLKS |
| 3(1:1:1:1) | | VTAADTAVYYCARGGQGGYDWGHYHGLDVWGKGTTVTVSSASTKGPSVFPL |
| HC2 | | APSSKSTSGGTAALGCLVKDYFPEPVTVSWNSGALTSGVHTFPAVLQSSGLY |
| HC2 | | SLESVVTVPSSSLGTQTYICNVNHKPSNTKVDKKVEPKSCDKTHTCPPCPAPE |
| | | AAGGPSVFLFPPKPKDTLMISRTPEVTCVVVDVSHEDPEVKFNWYVDGVEVHN |
| | | AKTKPREEQYNSTYRVVSVLTVLHQDWLNGKEYKCKVSNKALGAPIEKTISKA |
| | | KGQPREPQVYTLPPSREEMTKNQVSLWCLVKGFYPSDIAVEWESNGQPENNY |
| | | KTTPPVLDSDGSFFLYSKLTVDKSRWQQGNVFSCSVMHEALHNHYTQKSLSL |
| | | SPGKGGSGGDYKDDDDK |

Lrp VHH or sdAb = italics
anti-Fzd light chain = underline
anti-Fzd heavy chain = bold

### Example 2

### Generation of Wnt Surrogate Molecules with Binding Specificity for the Fzd Receptor Hinge Region

[0314] Active Wnt surrogate molecules were generated comprising various combinations of Fzd binders that bind the Fzd receptor hinge region (see FIG. 2A) and LRP binders. Two antibodies that bind to the hinge region of Fzd7, anti-FZD7-1791 (SEQ ID NOS:70-71) and anti-FZD7-1291 (SEQ ID NOS:72-73), have been described in WO2016/205551 and WO2016/205566. These two antibodies were used to demonstrate that binders to the Fzd hinge region yield active Wnt surrogate molecules.

[0315] Both anti-FZD7-1791 and anti-FZD7-1291 were cloned into human IgG1 framework with LALA-PG mutations in Fc to reduce effector functions. LRP5 binder #3 (008S-D01; SEQ ID NO:97) was cloned in frame to the N-termini of the light chains of both antibodies as depicted in FIG. 2B. Both recombinant appended IgG proteins, named 1791-3 (SEQ ID NOs:113-114) and 1291-3 (SEQ ID NOs:111-112), respectively, were prepared by transfection of respective expression vectors into Expi293F cells (Thermo Fisher Scientific, Waltham, Mass.) according to the manufacturer's instructions. Briefly, four days after the transfection, cell culture medium was collected after spinning down the cell pellet. The media was incubated with Protein A resin (REPLIGEN, Waltham, Mass.) for collecting proteins containing human IgG-Fc portion. Proteins were eluted with 10 mM glycine, pH 3.5 from Protein A resin. Subsequently, the protein elutes were fractionated and further purified by size-exclusion chromatography (SEC). SEC was performed by a fast protein liquid chromatography using a Superdex 200 Increase 10/300 GL (GE Healthcare, Pittsburgh, Pa.) in HBS buffer (10 mM HEPES, 150 mM NaCl, pH7.4). The peak fractions were analyzed by SDS-Polyacrylamide Gel Electrophoresis (SDS-PAGE) to confirm the content.

[0316] Antibodies that bind to the hinge region of Fzd1 and Fzd2 were utilitized to demonstrate that, in addition to the Fzd7 hinge, other Fzd hinge regions also yield active Wnt surrogate molecules. Recombinant Fab fragments of these antibodies were produced from Expi293F cells (Thermo Fisher Scientific, Waltham, Mass.) via transient transfection. The Fabs were purified from the culture media with Nickel resin and further polished with size exclusion chromatography (SEC).

[0317] The anti-FZD1 hinge and anti-FZD2 hinge antibodies were cloned into human IgG1 framework with LALA-PG mutations in Fc to reduce effector functions. LRP5 binder #3 (008S-D01; SEQ ID NO:97) or LRP5/6 binder #36 (013S-D05; SEQ ID NOs: 91 and 96) were cloned in frame to the N-termini of the light chains of respective antibodies as depicted in FIG. 2B. The recombinant appended IgG proteins were prepared by transfection of respective expression vectors into Expi293F cells (Thermo Fisher Scientific, Waltham, Mass.) according to the manufacturer's instructions. Briefly, four days after the transfection, cell culture medium was collected after spinning down the cell pellet. The media was incubated with Protein A resin (REPLIGEN, Waltham, Mass.) for collecting proteins containing human IgG-Fc portion. Proteins were eluted with 10 mM glycine, pH 3.5 from Protein A resin. Subsequently, the protein elutes were fractionated and further purified by size-exclusion chromatography (SEC). SEC was performed by a fast protein liquid chromatography using a Superdex 200 Increase 10/300 GL (GE Healthcare, Pittsburgh, Pa.) in HBS buffer (10 mM HEPES, 150 mM NaCl, pH7.4). The peak fractions were analyzed by SDS-Polyacrylamide Gel Electrophoresis (SDS-PAGE) to confirm the content. The results indicated that these antibodies also yielded active Wnt surrogate molecules.

### Example 3

### Binding Kinetics of Hinge Region-Specific Wnt Surrogate Molecules

[0318] Binding kinetics of 1791-3 and 1291-3 to either Fzd7 CRD or Fzd7 CRD with the extracellular hinge region sequences (Fzd7 CRD+hinge) was determined by bio-layer interferometry (BLI) using Octet Red 96 (PALL ForteBio, Fremont, Calif.) instruments at 30° C., 1000 rpm with streptavidin (SA) biosensors. N-terminal biotinylated Fzd7 CRD and Fzd7 CRD+hinge proteins were captured on the SA biosensor. Following capture of biotinylated-Fzd7, the SA biosensor with captured biotinylated-Fzd7 was dipped into wells containing the relevant antibodies at 7 different concentrations in running buffer plus a well with only running buffer as a reference channel. KD was determined by global fitting. As shown in FIG. 2C, both of these antibody fusion proteins only bound to the Fzd7 protein with the hinge region, and not to the Fzd7 CRD domain alone.

### Example 4

### In Vitro Activity of Hinge Region-Specific Wnt Surrogate Molecules

[0319] The ability of 1791-3 and 1291-3 to activate Wnt signaling was assessed in the 293 STF cell line, where the β-Catenin luciferase reporter plasmid Super TOP Flash (STF) was stably integrated. As shown in FIG. 2D, both 1791-3 and 1291-3 activated Wnt signaling as judged by the induction of luciferase reporter in these cells in the present of 20 nM R-spondin 2 (RPSO). 1791-3 showed higher activity than 1291-3, even though 1291-3 had higher affinity to Fzd7 CRD+hinge, suggesting that potential differences in geometry between the two antibodies may contribute to differences in activity. Another Wnt surrogate molecule, R2M3-3 (Fzd binder 001S-A04; Lrp binder 008S-D01; SEQ ID NOs:109-110), which can engage Fzd1, Fzd2, Fzd7, Fzd5, and Fzd8, was also tested. As shown in FIG. 2D, the maximal effect from 1791-3 is approaching that of the multifamily specific R2M3-3.

[0320] The ability of Wnt surrogates comprising antibodies that bind the Fzd1 or Fzd2 hinge regions to activate Wnt signaling was assessed in the 293 STF cell line overexpressing either Fzd1 or Fzd2, where the β-Catenin luciferase reporter plasmid Super TOP Flash (STF) was stably integrated. For the Luciferase reporter assays, in each 96 well plate, 1 million cells were seeded, IWP2 (a wnt signaling inhibitor) was added at 3 μM final concentration. 26 hours after seeding, compounds were added to the 96 well plates with triplicates and 10-fold series dilution from 100 nM, and the highest concentration is 500 nM. 18 hours later, cells were lysed with 100 μl lysis buffer. From the above lysed cells, 20 ul samples were transferred to opaque 96-well plates. Toward each well, 10 μl of luciferase substrate was added. The plate was immediately placed in Molecular Device Lum96 plate reader and luciferase luminescence signals were collected. Data were processed with Prism7. These antibodies activated Wnt signaling as judged by the induction of luciferase reporter in these cells with either Fzd1 or Fzd 2 overexpression in the present of 20 nM R-spondin 2 (RPSO). These results demonstrate that Fzd hinge binding antibodies when assembled with LRP binders can induce Wnt signaling activation.

### Example 5

### Generation of Multispecific Wnt Surrogate Molecules

[0321] Sequences from monospecific Wnt surrogate molecules were combined to generate a multispecific Wnt surrogate molecule with a desired combination of Fzd binding specificity. As depicted in FIG. 3A, two monospecific Wnt surrogate molecules, 4SD1-3 (Fzd binder 004S-D01; Lrp binder 008S-D01; SEQ ID NOs:115-116), which binds Fzd4, and 14SB6-3 (Fzd binder 0145-B06; Lrp binder 008S-D01; SEQ ID NOs:117-118), which binds Fzd9, were combined using knobs-into-holes technology into a hetero-Ig Wnt surrogate molecule, hetero-Ig 4SD1-3+14SB6-3 (SEQ ID NOs:120 and 122). Half of the hetero-Ig molecule came from 4SD1-3 with the introduction of the “holes” mutations in the CH3 domain (SEQ ID NO:120). This half of the molecule contained one binding arm to Fzd4 and one binding arm to LRP5. The other half of the hetero-Ig molecule came from 14SB6-3 with the introduction of the “knobs” mutations in the CH3 domain (SEQ ID NO:122). This half of the molecule contained one binding arm to Fzd9 and one binding arm to LRP5. The final Wnt surrogate, hetero-Ig 4SD1-3+14SB6-3, was a tetravalent tri-specific molecule containing one binding arm to Fzd4, one binding arm to Fzd9, and two binding arms to LRP5.

[0322] Two control molecules were also generated: 4SD1-3 monovalent bispecific (SEQ ID NO:120 and 123) and 14SB6-3 monovalent bispecific (FIG. 3A) SEQ ID NO:122 and 124). The 4SD1-3 monovalent bispecific molecule contained the 4SD1-3 half of the hetero-Ig with the “holes” mutations (SEQ ID NO:120) paired with an Fc with “knobs” mutations (SEQ ID NO:123), but without an Fab arm; therefore, this molecule was bispecific but monovalent against Fzd4 and LRP5. The 14SB6-3 monovalent bispecific contained the 14SB6-3 half of the hetero-Ig with the “knobs” mutations SEQ ID NO:122) paired with an Fc with “holes” mutations SEQ ID NO:124), but without an Fab arm; therefore, this molecule was bispecific but monovalent against Fzd9 and LRP5.

[0323] Hetero-Ig 4SD1-3+14SB6-3, 4SD1-3 monovalent bispecific, and 14SB6-3 monovalent bispecific were purified through a 4-step purification process. Since the Fc containing the “knobs” mutation also contains a FLAG tag, and the Fc containing the “holes” mutation also contains a His tag, these proteins were purified first by protein A and Ni-NTA affinity purification steps, followed by an SEC step; Anti-FLAG M2 beads were used as a final purification step.

### Example 6

### Characterization of Multispecific Wnt Surrogate Molecules

[0324] The ability of hetero-Ig 4SD1-3+14SB6-3, 4SD1-3 monovalent bispecific, and 14SB6-3 monovalent bispecific to activate Wnt signaling was assessed in Wnt-responsive 293STF reporter cells in the presence or absence of 20 nM RPSO (only data in the presence of RPSO is shown in FIGS. 3B-3E). R2M3-3, which can bind to Fzd1, Fzd2, Fzd7, Fzd5, and Fzd8, was also tested.

[0325] The 293STF cell line expresses low level of Fzd4 and no detectable Fzd9 expression by QPCR. All molecules other than R2M3-3 showed very little or no activity in the parental 293STF cells (FIG. 3B).

[0326] A retrovirus-based Fzd4 overexpression 293STF stable cell line was generated (293STF Fzd4OE). In this cell line, both R2M3-3 and 4SD1-3 (Fzd4 monospecific) potently activated Wnt signaling, while the hetero-Ig 4SD1-3+14SB6-3 showed very weak activity, and the Fzd9 monospecific molecule, 14SB6-3 was inactive (FIG. 3C).

[0327] Fzd9 was introduced into the parental 293STF cells through transient transfection to create the 293STF Fzd9OE cell line. In this cell line, both R2M3-3 and 14SB6-3 (Fzd9 monospecific) were able to activate Wnt signaling, while the hetero-Ig 4SD1-3+14SB6-3 showed very weak activity, and the Fzd4 monospecific molecule, 4SD1-3 was inactive (FIG. 3D).

[0328] Fzd4 and Fzd9 were co-introduced into 293STF cells through a combination of retroviral Fzd4 delivery and Fzd9 transient transfection to create the 293STF Fzd4OE+Fzd9OE cell line. In this cell line, R2M3-3, 4SD1-3, 14SB6-3, and hetero-Ig 4SD1-3+14SB6-3 were all fully active (FIG. 3E)

[0329] The two monovalent bispecific molecules, 4SD1-3 monovalent bispecific and 14SB6-3 monovalent bispecific, were inactive in all cells (FIGS. 3B-3E). These results demonstrated that for the two monospecific binders, the monovalent bispecific combination with a LRP5 binder is not able to induce or not able to efficiently induce Wnt signaling. Therefore, the activity observed with the hetero-Ig 4SD1-3+14SB6-3 was indeed the result of the engagement of both Fzd4 and Fzd9 proteins, together with LRP. These results further demonstrated that this approach can be applied to any combination of two or more Fzd binders of different specificities, thus enabling the generation of any desired combination of Fzd specificities through this process.

[0330] This example showed that two Fzd binders of different specificities can be combined in the hetero-Ig format to generate Wnt surrogate molecules of different specificities. This concept can also be extended to the use of two Fzd binders to the same Fzd on two different epitopes. The resulting hetero-Ig Wnt surrogate molecule would be a biparatopic molecule, which may be beneficial for further receptor clustering and activation of Wnt signaling.

### Example 7

### Heterodimerization of Canonical and Noncanonical Signaling Fzd Receptors Together with LRP Receptor Binding Leads to Activation of Beta-catenin-dependent Signaling

[0331] Wnt signaling can be mediated through beta-catenin-dependent (canonical) and beta-catenin-independent (noncanonical) pathways. There are Fzd receptors that have been reported to activate beta-catenin-independent signaling such as Fzd6, while other Fzd receptors activate beta-catenin-dependent signaling. It has not been considered previously whether forced dimerization of a noncanonical Fzd receptor with Lrp or heterodimerizing a canonical and a noncanonical Fzd receptors with Lrp can lead to beta-catenin-dependent or beta-catenin-independent signaling. To test these ideas, the following examples were generated.

[0332] First, a multivalent molecule consisting of bivalent binding arms (004S-C10) toward Fzd6, a noncanonical receptor, was combined with bivalent binding arms (3; 004S-D01) toward Lrp5. The molecule is named 4SC10-3 (FIG. 5A top panel). Such a format has been shown to activate beta-catenin-dependent signaling when the Fzd binder is directed against a canonical Fzd receptor. However, as shown in FIG. 5A bottom panel, 4SC10-3 was not able to effectively activate beta-catenin-dependent signaling in 293STF reporter cells (in the presence of 20 nM R-spondin), in contrast to the positive control molecule R2M3-26 (Fzd binder 001S-A04; Lrp binder 0095-E04) that engages Fzd1,2,7,5,8.

[0333] Next, a multivalent molecule consisting of 4SC10 and another Fzd binding arm, 1RC07 (001S-B03), which binds to Fzd1,2,7 (canonical Fzd receptors), was combined with bivalent binding arms (3) toward Lrp5. The molecule is named heterolg 4SC10-3+1RC07-3 (FIG. 5B top panel), and it activated beta-catenin-dependent signaling in 293STF reporter cells. To rule out the possibility that the 1RC07-3 arm alone is able to activate signaling, the 1RC07-3 monovalent bispecific molecule shown in FIG. 5C top panel was also tested. As shown in FIG. 5C, 1RC07-3 monovalent bispecific molecule is not able to effectively activate signaling. These results demonstrated for the first time that combining a canonical and a noncanonical Fzd receptors with Lrp can lead to beta-catenin-dependent signaling.

### Example 8

### Exploring Impact of Different Ratios of Fzd to Lrp Binders in Wnt Surrogate Molecules on Beta-Catenin-Dependent Signaling

[0334] Multivalent formats produced potent and highly efficacious Wnt signaling activators. Experiments were designed to test the impact of the formats on endogenous Wnt signaling. To understand the bivalent/multivalent Lrp binding arms impact on endogenous Wnt ligands, an inactive surrogate molecule was generated with a null mutant of R2M3, R2M3mut (Y9A), and fused to either Lrp binders 3 or 26, and named R2M3mut-3 or R2M3mut-26, respectively. As shown in FIG. 6A, while the wild-type R2M3 surrogates, R2M3-3 and R2M3-26, are fully active in 293STF Wnt reporter cell line in the presence of 20 nM R-spondin, R2M3mut-3 and R2M3mut-26 are inactive. To test the impact of the bivalent Lrp arms in the surrogate molecules on endogenous Wnt signaling, we tested these two inactive surrogate molecules in 293STF Wnt reporter cell line in the presence of 20% conditioned media containing Wnt3A. As shown in FIG. 6B, while R2M3mut-3 and R2M3mut-26 are inactive on their own, R2M3mut-3 synergized with Wnt3a in a dose responsive manner, and R2M3mut-26 antagonized Wnt3a in a dose responsive manner. This demonstrated that multivalent formats might have potential to interact with endogenous Wnt ligands.

[0335] To understand formats that reduce the potential interaction with endogenous Wnts and to further understand the required number of receptor binders for active signaling, we explored different number and ratios of Fzd and Lrp binders in a multivalent surrogate molecule.

[0336] Since bivalency of the Lrp binding arms may lead to synergy with endogenous Wnts, removing one Lrp binding arm was tested, so in the final molecule there are two Fzd binders and one Lrp binder; this molecule is referred to as 2:1. The original molecule format would be 2:2 as there are two Fzd binders and two Lrp binding arms. One example of the 2:1 molecule, 1RC07-3 (2:1) is shown in FIG. 6C left panel, in comparison to the 2:2 format. As shown in FIG. 6C right panel, 1RC07-3 (2:1) is active and able to induce Wnt signaling in 293STF reporter cells. This format, in principle, should lack the ability to synergize with endogenous Wnt ligands via cross-linking of Lrp co-receptors. The reverse ratio, one Fzd binder and two Lrp binders, as exemplified by a few formats in FIG. 6D, has also been constructed. In general, these molecules at best, showed modest induction of signaling (FIG. 6D).

[0337] Since heterodimerizing Fzd in the 2:2 format can induce Wnt signaling (shown in FIG. 3 and FIG. 5), a molecules was constructed heterodimerizing two different Fzd binders with one Lrp binder (1:1:1) format and tested for the ability to confer Wnt signaling. As shown in FIG. 6E, several examples of 1:1:1 molecules all activated Wnt signaling in 293STF reporter cells. Fzd binders tested in this structure include R2M3 (001S-A04),1RC07 (001S-B03), R2M13 (004S-G06), and 5S-H5 (005S-H05)

### Example 9

### Heterodimerization of Lrp Binders Together with Fzd Binding Leads to Activation of Wnt Signaling

[0338] In addition to heterodimerizing/multimerizing different Fzd receptor binders, the effects of heterodimerizing/multimerizing different Lrp co-receptor binders on Wnt signaling was also tested. As shown above, the two Fzd:one Lrp format alleviated synergy with endogenous Wnt ligands. To determine if heterodimerized/multimerized Lrp binders directed against two different regions on Lrp may also relieve synergistic effects of bivalent Lrp binder formats on endogenous Wnt ligands was tested. As shown in FIG. 7A, several examples were contstructed in a 2:1:1 ratio, where two different Lrp binders (one binds to Lrp5E1 E2, the other binds to Lrp6E3E4) were each fused to either the N-terminus of light chain of Fzd binder, 1RC07, as 1RC07-3-26 NL (2:1:1); or to the N-terminus of 1RC07 heavy chain as 1RC07-3-26 NH (2:1:1). Both molecules are highly active in inducing Wnt signaling as detected in a 293STF Wnt responsive reporter cells (FIG. 7B).

[0339] Finally, a multivalent molecule with two distinct Fzd binding arms and two distinct Lrp binding arms, termed 1:1:1:1 format as shown in FIG. 7C was generated. Both the 1RC07-26+45D1-3 (1:1:1:1) and R2M9-26+1RC07-3 (1:1:1:1) combinations resulted in strong induction of Wnt signaling (FIG. 7D). R2M9 structure contains the 0035-E07 Fzd binding element.

[0340] The examples shown in FIGS. 5-7 illustrate the various structures for induction of canonical or non-canonical Wnt signaling (or both), as well as the ability to synergize with, antagonize, or leave unaffected signaling via endogenous Wnt ligands within target tissues. This versatile collection of soluble Wnt surrogate ligands could be used for therapies with tailored Wnt signaling that may allow for maximum therapeutic effect and minimal side effects.

### Example 10

### Structure-Function Analysis of Wnt Surrogate Molecules Containing Different Stoichiometric Ratios of Fzd and LRP Binders

[0341] A surrogate WNT agonist generated by linking a FZD binder (18R5 antibody in scFv format) and the C-terminal portion of Dickkopf (DKK1c) into a single polypeptide chain (18R5-DKK1c) exhibited the ability to activate WNT/β-catenin signaling (Janda et al., 2017, Nature, 545(7653):234-237). Combination of various FZD and LRP binding antibody fragments were generated based on this concept.

[0342] The sequences for Fzd binding scFvs, referred to as F1, F2, and F3, and LRP scFvs, referred to as L1 and L2, as well as linker sequences used to combine them are shown in Table 6A. Since these molecules have a monovalent binding arm to each target, we refer to this format as bivalent bispecific format (denoted as 1:1 to represent the stoichiometry of binding to one FZD and one LRP molecule).

[0343] Additional stoichometries for the tandem scFv constructs were tested. A summary of Combinatorial Wnt surrogate constructs used for this analysis are shown in Table 6B.

TABLE 6A
Wnt surrogate components used to stoichiometric analysis

| | SEQ | | Specificity | |
|---|---|---|---|---|
| | ID | | (Clone | |
| Component | NO | Designation | name) | Sequence |
| signal | 2234 | | | MDMRVPAQLLGLLLLWLRGARC |
| peptide | | | | |
| antiFZD_scFv | 2235 | F1: | antiFZD1, | EVQLVESGGGLVQPGGSLRLSCAASGFTFSHYTLSW |
| | | | 2, 7, 5, 8 | VRQAPGKGLEWVSVISGD |
| | | | (18R5) | GSYTYYADSVKGRFTISSDNSKNTLYLQMNSLRAEDT |
| | | | | AVYYCARNFIKYVFANWG |
| | | | | QGTLVTVSSGGGGSGGGGSGGGGSDIELTQPPSVSV |
| | | | | APGQTARISCSGDNIGSFY |
| | | | | VHWYQQKPGQAPVLVIYDKSNRPSGIPERFSGSNSG |
| | | | | NTATLTISGTQAEDEADYY |
| | | | | CQSYANTLSLVFGGGTKLTVL |
| | 2236 | F2: | antiFZD1, | EVQLVESGGGLVQPGGSLRLSCAASGFNISSSYIHWV |
| | | | 2, 7 | RQAPGKGLEWVAYIYSSY |
| | | | (R2H1) | GSTYYADSVKGRFTISADTSKNTAYLQMNSLRAEDTA |
| | | | | VYYCARASWYALDYWG |
| | | | | QGTLVTVSSGSAASGSSGGSSSGADIQMTQSPSSLS |
| | | | | ASVGDRVTITCRASQSVSSAV |
| | | | | AWYQQKPGKAPKLLIYSASSLYSGVPSRFSGSRSGTD |
| | | | | FTLTISSLQPEDFATYYCQQ |
| | | | | YWYGVAPITFGQGTKVEIK |
| | 2237 | F3: | antiFZD5, | EVQLVESGGGLVQPGGSLRLSCAASGFNISYSYIHWV |
| | | | 8 (2919) | RQAPGKGLEWVASIYSSSGS |
| | | | | TSYADSVKGRFTISADTSKNTAYLQMNSLRAEDTAVY |
| | | | | YCARGAIDYWGQGTLVTV |
| | | | | SSGGGGSGGGGSGGGGSDIQMTQSPSSLSASVGDR |
| | | | | VTITCRASQSVSSAVAWYQQK |
| | | | | PGKAPKLLIYSASSLYSGVPSRFSGSRSGTDFTLTISS |
| | | | | LQPEDFATYYCQQWYSSGHV |
| | | | | LITFGQGTKVEIK |
| antiLRP_scFv | 2238 | L1: | antiLRP6E | DVKLVESGGGLVKLGGSLRLSCAASGFSFSTSYMSW |
| | | | 1E2 | VRQTPEKRLELVAAINLNGGS |
| | | | (1115.3) | TYYSDTVKGRFTISRDNAKNTLYLQMSSLKSEDTAFY |
| | | | | YCASELAGYGTPFAYWGQGT |
| | | | | LVTVSAGSAASGSSGGSSSGADIVLTQSPATLSVTPG |
| | | | | DSVSLSCKASQSISYNLHWYQQ |
| | | | | KSHESPRLLIKYTSQSISGIPSRFSGSGSGTDFTLTINN |
| | | | | VETEDFGMYFCQQSNSWPLTFG |
| | | | | AGTKLEVK |
| | 2239 | L2: | antiLRP6E | EVQLVESGGGLVQPGGSLRLSCAASGFTFTSYYISWV |
| | | | 3E4 | RQAPGKGLEWVAEISPYSGST |
| | | | (G211) | YYADSVKGRFTISADTSKNTAYLQMNSLRAEDTAVYY |
| | | | | CALRARPPIRLHPRGSVMDY |
| | | | | WGQGTLVTVSSGSAASGSSGGSSSGADIQMTQSPSS |
| | | | | LSASVGDRVTITCRASQDVSTA |
| | | | | VAWYQQKPGKAPKLLIYSASFLYSGVPSRFSGSGSGT |
| | | | | DFTLTISSLQPEDFATYYCQQS |
| | | | | YTTPPTFGQGTKVEIK |
| antiGFP_scFv | 2240 | | | QVQLVESGGGLVQPGGSLRLSCAASGFT |
| | | | | FSRYGMHWVRQAPGKGLEWVSGISSIGS |
| | | | | NTYYADSVKGRFTISRDNSKNTLYLQMNS |
| | | | | LRAEDTAVYYCARWYKTYIDVWGQGTLVT |
| | | | | VSSGGGGSGGGGSGGGGSDIELTQPPSV |
| | | | | SVAPGQTARISCSGDNLGKKYVYWYQQK |
| | | | | PGQAPVLVIYGDDERPSGIPERFSGSNSG |
| | | | | NTATLTISGTQAEDEADYYCASYDSSHILIV |
| | | | | FGGGTKLTVL |
| linker | 2241 | 5-mer (5) | | GSGSG |
| between | 2242 | 10-mer (10) | | GSGSGGSGSG |
| tandem | 2243 | 15-mer (15) | | GSGSGGSGSGGSSGG |
| scFv | | | | |
| hIgG1_Fc_ | 2244 | Fc | | DKTHTCPPCPAPEAAGGPSVFLFPPKPKDTLMISR |
| LALAPG | | | | TPEVTCVVVDVSHEDPEVKFNWYVDG |
| | | | | VEVHNAKTKPREEQYNSTYRVVSVLTVLHQDWLN |
| | | | | GKEYKCKVSNKALGAPIEKTISKAKG |
| | | | | QPREPQVYTLPPSREEMTKNQVSLTCLVKGFYPSD |
| | | | | IAVEWESNGQPENNYKTTPPVLDSDGS |
| | | | | FFLYSKLTVDKSRWQQGNVFSCSVMHEALHNHYT |
| | | | | QKSLSLSPGK |
| | 2245 | Fc knob- | | DKTHTCPPCPAPEAAGGPSVFLFPPKPKDTLMISR |
| | | FLAG | | TPEVTCVVVDVSHEDPEVKFNWYVDGV |
| | | | | EVHNAKTKPREEQYNSTYRVVSVLTVLHQDWLNG |
| | | | | KEYKCKVSNKALGAPIEKTISKAKGQP |
| | | | | REPQVYTLPPSREEMTKNQVSLWCLVKGFYPSDIA |
| | | | | VEWESNGQPENNYKTTPPVLDSDGSFFL |
| | | | | YSKLTVDKSRWQQGNVFSCSVMHEALHNHYTQKS |
| | | | | LSLSPGKGGSGGDYKDDDDK |
| | 2246 | Fc_hole_His | | DKTHTCPPCPAPEAAGGPSVFLFPPKPKDTLMISR |
| | | | | TPEVTCVVVDVSHEDPEVKFNWYVDGVE |
| | | | | VHNAKTKPREEQYNSTYRVVSVLTVLHQDWLNGK |
| | | | | EYKCKVSNKALGAPIEKTISKAKGQPRE |
| | | | | PQVYTLPPSREEMTKNQVSLSCAVKGFYPSDIAVE |
| | | | | WESNGQPENNYKTTPPVLDSDGSFFLVSK |
| | | | | LTVDKSRWQQGNVFSCSVMHEALHNHYTQKSLSL |
| | | | | SPGKGSGSGHHHHHH |
| linker | 2241 | | | GSGSG |
| before tags | | | | |
| or Fc | | | | |
| tags | 2247 | Flag | | DYKDDDDK |
| | 2248 | His | | HHHHHH |

TABLE 6B
Combinatorial Wnt surrogate Constructs

| FZD:LRP ratio | Construct |
|---|---|
| 1FZD:1LRP | L1:5:F1_His |
| | L1:10:F1_His |
| | L1:15:F1_His |
| | F1:5:L1_His |
| | F1:10:L1_His |
| | F1:15:L1_His |
| | L2:5:F1_His |
| | L2:10:F1_His |
| | L2:15:F1 His |
| | F1:5:L2_His |
| | F1:10:L2_His |
| | F1:15:L2_His |
| | L2:5:F2_His |
| | L2:15:F2_His |
| | F2:5:L2_His |
| | F2:15:L2_His |
| | L1:5:F2_His |
| | L1:15:F2_His |
| | F2:5:L1_His |
| | F2:15:L1_His |
| | F3:5:L1_His |
| | L1:5:F3_His |
| | F3:5:L2_His |
| | L2:5:F3_His |
| | F1:5:Fc_knob + L2:5:Fc_hole |
| | F1:5:αGFP:Fc_knob + L2:5:aGFP:Fc_hole |
| | F1:5:αGFP:Fc_knob + αGFP:5:L2:Fc_hole |
| | αGFP:5:F1:Fc_knob + L2:5:αGFP:Fc_hole |
| | F3:5:Fc_knob + L2:5:Fc_hole |
| | F3:5:αGFP:Fc_knob + αGFP:5:L2:Fc_hole |
| | αGFP:5:F3:Fc_knob + L2:5:αGFP:Fc_hole |
| | L2:5mer:αGFP:Fc_knob + αGFP:5mer:F2:Fc_hole |
| | F2:5:Fc_knob + L2:5:Fc_hole |
| | F2:5:αGFP:Fc_knob + αGFP:5:L2:Fc_hole |
| 2FZD:2LRP | L1:5:F1:Fc |
| | L1:10:F1:Fc |
| | L1:15:F1:Fc |
| | F1:5:L1:Fc |
| | F1:10:L1:Fc |
| | F1:15:L1:Fc |
| | L2:5:F1:Fc |
| | L2:10:F1:Fc |
| | L2:15:F1:Fc |
| | F1:5:L2:Fc |
| | F1:10:L2:Fc |
| | F1:15:L2:Fc |
| | L1:5:F2:Fc |
| | L1:15:F2:Fc |
| | F2:5:L1:Fc |
| | F2:15:L1:Fc |
| | L2:5:F2:Fc |
| | L2:15:F2:Fc |
| | F2:5:L2:Fc |
| | F2:15:L2:Fc |
| | F3:5:L1:Fc |
| | F3:5:L2:Fc |
| | L1:5:F3:Fc |
| | L2:5:F3:Fc |
| | F1:5:Fc:5:L1 |
| | L1:5:Fc:5:F1 |
| | F1:5:Fc:5:L2 |
| | L2:5:Fc:5:F1 |
| | F3:5:L2:Fc_knob + F2:5:L2:Fc_hole |
| | L2:5:F3:Fc_knob + L2:5:F2:Fc_hole |
| | L1:5:F3:Fc_knob + L2:5:F2:Fc_hole |
| | F3:5:L1:Fc_knob + F2:5:L2:Fc_hole |
| 0FZD:2LRP | αGFP:5:L1:Fc |
| | L1:5:αGFP:Fc |
| | αGFP:5:L2:Fc |
| | L2:5:αGFP:Fc |
| 2FZD:0LRP | αGFP:5:F1:Fc |
| | F1:5:αGFP:Fc |
| 2FZD:1LRP | F2:5:L2:Fc_knob + F2:5:αGFP:Fc_hole |
| | L2:5:F2:Fc_knob + αGFP:5:F2:Fc_hole |
| | αGFP:5:F2:Fc_knob + L2:5:F2:Fc_hole |
| | L2:5:F3:Fc_knob + αGFP:5:F2:Fc_hole |
| 1FZD:2LRP | F2:5:L2:Fc_knob + αGFP:5:L2:Fc_hole |
| | L2:5:F2:Fc_knob + L2:5:αGFP:Fc_hole |
| | F3:5:L2:Fc_knob + αGFP:5:L2:Fc_hole |
| | L2:5:F3:Fc_knob + L2:5:αGFP:Fc_hole |

[0344] A set of molecules generated replaced the DKK1c component in the 18R5-DKK1c molecule (Janda et al., 2017, Nature, 545(7653):234-237) with LRP binding antibody fragments in scFv format to generate a tandem scFv molecule, depicted in FIG. 8A. The LRP binder is a LRP6 E1E2 domains binder, 1115.3 (U.S. Pat. No. 8,715,941 B2), which is referred herein as L1. To test the impact of geometry to activity, L1 was fused to either the N- or C-terminus of 18R5 scFv (referred herein as F1) with 5, 10, or 15 amino acid linkers in between. This set of six proteins were purified to near homogeneity via Ni-affinity column (FIG. 8B) and tested in WNT responsive 293 STF reporter cells. While linker length did not seem to significantly affect activity, having the LRP6 binder fused to the N-terminus of the FZD binder, resulted in much higher activity than the other orientation (compare FIG. 8C to FIG. 8D, note the differences in the y-axis). All of these new surrogate molecules showed lower Emax (maximal response) than did both WNT3A and 18R5-DKK1c tested in parallel (FIG. 9).

[0345] Since scFv fragments have tendencies to form higher molecular weight aggregates, to confirm whether the surrogate WNT activities came from the monomeric form of the tandem scFv molecules, these six proteins were purified on size-exclusion-chromatography (SEC) and the peak fractions corresponding to the monomeric forms were tested in the 293 STF reporter cells. In contrast to the Ni purified material before SEC, the SEC purified proteins significantly lost activity (compare FIGS. 8E and 8F to 8C and 8D). The fractions across the SEC runs were assayed in the 293 STF reporter cells. Peak activities were identified across the column fractions; however, the STF activity peaks did not coincide with the protein peak of the monomeric molecules. Instead, in all cases, the STF activity peaked in the higher molecular weight fractions (FIGS. 8G and 8H, SEC molecular weight standards shown in FIG. 81), suggesting that the 1:1 tandem scFv molecules were ineffective in inducing β-catenin dependent signaling. These results suggest that efficient activation of WNT signaling requires multimerization of receptor complexes. The tandem scFv molecules, which contain a 6×His tag, were artificially crosslinking with anti-His antibodies and tested in the 293 STF reporter assay. As shown in FIG. 8J, while L1:5:F1 from the monomeric faction alone was not effective in activating β-catenin dependent signaling in the presence of an isotype control (anti-GFP) antibody, the addition of anti-His antibody significantly induced signaling, supporting the idea that multimerization of receptor complexes may be required for signaling.

[0346] Multivalent molecules were produced in a more defined and easily produced format by attaching L1 and F1 tandem scFv fusions to the N-terminus of an Fc fragment as depicted in FIG. 10A to generate a tetravalent bispecific format. In this format, there are two binding sites against each receptor target (also noted as 2:2 in later sections representing a stoichiometric ratio of two FZDs and two LRPs). These proteins were purified by Protein A affinity step followed by SEC. As shown in FIGS. 10B and 10C, the activity peaks from the 293 STF assay across the SEC fractions coincided with the protein peaks that corresponded to the monomer species of the molecule shown in FIG. 10A. SEC molecular weight standards are shown in FIG. 10D. These new configurations demonstrated a correlation between STF and major protein peaks. Dose response curves of the peak fractions were also performed, while linker length did not seem to significantly affect activity, the relative orientation of the two binders did affect activity. Fusing L1 to the N-terminus of F1 is the preferred orientation for the combination of these two binders (compare FIGS. 10E and 10F y-axis). The relative Emax of the activities of these multivalent bispecific FZD/LRP binding molecules as compared to WNT3A and 18R5-DKK1c are similar to that of the pre-SEC material shown in FIG. 8 (FIG. 11). The affinity of the binding arms to their respective receptors in this tetravalent bispecific format was determined using bio-layer interferometry on an Octet instrument. As shown in FIG. 11B the relative orientation and linker lengths had no impact on the affinity of the respective arms to their target receptors, suggesting that the effects of orientation on the reporter activity is not due to impact of format on binding but rather the geometry of the receptors assembled by the surrogate molecules.

[0347] DKK1c predominantly binds LRP E3E4 domain (Ahn et al., 2011, Cheng et al., 2011). To understand the impact of LRP epitope on activity, the fusion of F1 with an LRP6E3E4 binder, YW211.31.57 (U.S. Pat. No. 8,846,041 B2) referred herein as L2, was tested in the 1:1 tandem scFv format where L2 was fused to either the N- or C-terminus of F1 scFv with 5, 10, or 15 amino acid linkers in between. While these fusion proteins behaved less well and expressed at lower levels compared to the L1/F1 fusion proteins (FIG. 13A), similar to L1/F1 fusion proteins shown in FIG. 8, the 1:1 tandem scFv of L2/F1 fusions were also ineffective in inducing β-catenin dependent signaling in 293 STF reporter cells as seen both in activity tests across the SEC column (FIG. 13A) as well as titration of monomeric peak fractions from the SEC column (FIG. 13B). Fusion of the tandem scFv L2/F1 molecules to an Fc fragment to generate a 2:2 tetravalent bispecific molecule efficiently activated canonical WNT signaling. As shown in FIG. 12A, the peak from the 293 STF assay across the SEC fractions coincided with the protein peak that corresponded to the monomeric species. These L2/F1 fusion molecules are much more active than the L1/F1 fusion molecules with Emax in range similar to WNT3A and significantly improved potency beyond both WNT3A and 18R5-DKK1c (FIG. 12B). The L2 and F1 combinations are less sensitive to orientation; both orientations resulted in similar Emax, while having L2 on the N-terminus of F1 with a 15mer linker yielded higher potency (FIGS. 12B and 12C).

[0348] As a control to verify that the 2:2 tetravalent bispecific molecules activate WNT signaling requires binding to both FZD and LRP receptors, either the FZD binder (F1) or the LRP binders (L1 or L2) was replaced with an scFv fragment that binds GFP in the 2:2 tetravalent bispecific format. These molecules are referred to as tetravalent monospecific or 2:0 or 0:2 formats. As shown in FIGS. 12D and 12E, while all of these molecules bind to their respective receptors, none of these tetravalent monospecific molecules are active, demonstrating that the ability to activate WNT signaling requires the engagement of both FZD and LRP.

[0349] To generate WNT surrogate molecules with different FZD specificity and to understand whether the multivalency requirement for WNT signaling is a general requirement beyond the FZD binder F1 (which binds FZD1,2,7,5,8, Gurney et al., 2012), fusion proteins were generated between additional FZD binders, R2H1 (US 2016/0194394 A1) which binds to FZD1,2,7 referred herein as F2, and 2919 (WO 2017/127933 A1) which binds to FZD5,8 referred herein as F3, with the two LRP6 binders L1 and L2. The specificity of F2 and F3 were verified in Octet binding assays (FIG. 15A)

[0350] F2/L1 combination in the 1:1 tandem scFv format were contructed with 5 and 15mer linkers. Similar to the F1 fusion data in FIG. 8, the peak STF activities across the SEC column broadly distributed in the higher molecular weight fractions and did not coincide with the peak of the monomeric form of the molecules (FIG. 15B). In contrast, a STF peak activity across the SEC column coincided with the monomeric forms when the tandem scFvs were fused to Fc fragments in the 2:2 tetravalent bispecific format (FIG. 14A). A second STF activity peak on the SEC column was also observed in the higher molecular weight fractions that were not observed with the F1 fusion molecules (FIG. 14A). The dose response curves from the monomeric SEC peak fractions on 293 STF reporter cells showed slight preference for L1 fusion to the N-terminus of F2 for higher activity (FIG. 14B) similar to the fusions with F1 (FIG. 10).

[0351] Fusions between F2 and L2 were also constructed in the various formats (Table 6B). While on SEC column, the peak STF activities did not coincide with the monomeric forms of F2 fused to the N-terminus of L2 in the 1:1 format (FIG. 14C), it appears that the monomeric 1:1 forms of the reverse orientation where L2 was fused to the N-terminus of F2 were active (FIG. 14D). Dose response of the peak fractions in this orientation showed weaker activity compared to WNT3A with a preference for the 5mer linker (FIG. 14E). The 2:2 tetravalent bispecific format from the fusion of these tandem scFvs to the N-terminus of Fc yielded highly potent molecules. On SEC column, the peak STF activities coincided with protein peak that's consistent with the monomeric forms (FIGS. 14F and 14H), and dose responses in 293 STF reporter cells showed potent and efficacious molecules, exceeded the activities of the F1/L2 fusions shown in FIG. 3 (FIGS. 14G and 14I).

[0352] The 1:1 bivalent bispecific tandem scFv format and the 2:2 tetravalent bispecific fusions to Fc were also constructed between F3 and the two LRP binders. Similar to the observation with F1 fusions shown in FIG. 8, no robust activities were observed for the 1:1 tandem scFv fusion molecules between F3 and L1 or L2 (FIG. 17). In contrast, 293 STF reporter activities of the fusion molecules between F3, LRP binders, and Fc in the 2:2 tetravalent bispecific format from the SEC column fractions coincided to the protein peak of the monomeric forms of the molecules (FIGS. 16A and 16B). It is interesting to note that similar to fusions with F1 and F2, the dose response of the peak SEC fractions show that the L2-F3 fusions are highly active in both orientations, while L1-F3 fusions are less active and show preference of L1 on the N-terminus of F3 (FIGS. 16C and 16D). All of these results together suggest that multivalency of FZD and LRP binding with the stoichiometry of two FZDs and two LRPs are required for consistent and efficient activation of β-catenin dependent signaling, at least with the binders tested.

[0353] Having established the multivalency requirement for efficient induction of canonical WNT signaling, alternative 2:2 tetravalent bispecific format where the two scFv binders are attached two the two ends of a Fc fragment as shown in FIGS. 18A and 18B were explored (termed dumbbell format). The fusion of F1 with L1 in this dumbbell format minimally activated WNT signaling in reporter assay (FIG. 18A). Interestingly, there is also a preference for the orientation of the L1 molecule where its attachment C-terminal to Fc affected activity. The fusions of F1 and L2 in this format also activated WNT signaling with similar preference in orientation for the LRP binding arm (FIG. 18B). The activity across the SEC columns were also tested for these molecules, and as shown in FIG. 18C, peak STF reporter activities coincided with the protein peak corresponding to the monovalent forms of the proteins.

[0354] To understand whether the activity from the 2:2 tetravalent bispecific format is due to the simultaneous binding of the same surrogate molecule to multiple FZDs and LRPs or whether it is due to a unique geometry provided by the format that does not require the multivalent binding to receptors, Octet binding studies to assess whether the 1:1 tandem scFv format allows simultaneous binding to both FZD and LRP. As shown in FIG. 19A, by sequential addition of FZD8 CRD to sensor surface, followed by 1:1 tandem scFv L2:5:F3 or F3:5:L2, and then LRP6 E3E4, a stepwise increase in binding signal was observed. This suggest that the 1:1 tandem scFv molecules are capable of binding to both receptors simultaneously, and therefore, the lack of activity from these molecules in inducing WNT signaling is not due to inability to crosslink FZD and LRP receptors.

[0355] To determine if the 2:2 tetravalent bispecific format still engages the receptors in the 1:1 fashion, however, through a unique geometry that allows signaling not provided by the 1:1 tandem scFv format. We constructed 4 different variations of the possible 1:1 geometry on the framework of the 2:2 tetravalent bispecific molecule as depicted in FIG. 19B and FIG. 20. None of these 4 molecules induced WNT signaling (FIG. 19C and FIG. 20A) suggesting that cross-linking multiple copies of the receptors are required for efficient signaling.

[0356] To further understand the required ratio of FZD to LRP receptors, either 2 FZD binders with 1 LRP binder (2:1) or 1 FZD binder combined with 2 LRP binders (1:2) were constructed as depicted in FIGS. 21A and 21D. As shown in FIG. 21, removing either 1 FZD binder or 1 LRP binder from the 2:2 format still activated β-catenin dependent signaling. Since the 1:1 formats shown in FIG. 19 did not activate signaling, these results further supports the notion that simultaneous engagement of the multiple FZDs and LRPs are necessary for efficient signaling. As removing 1 LRP binder having much less impact on the activity than removing 1 FZD binder, these results also suggest that dimerization of FZD receptors is more important for signaling complex formation.

[0357] The multivalency requirement for the efficient induction of canonical WNT signaling is established, however, since each of the FZD binding arms in the surrogate molecules have the specificity to several different FZD receptors, it is not clear whether signaling can come from heterodimerization of different FZD receptors. To address this question, two FZD binders that have non-overlapping specificity, F2 and F3, were combined into one molecule as depicted in FIG. 21G. While either F2 or F3 in the 1:2 format (1 FZD binder combined with 2 copies of LRP binders, FIGS. 21B and 21C) showed low to very low activities in the 293STF reporter cells, respectively, the combination of F2 and F3 together with 2 copies of LRP binders L2 into one molecule (we termed this 1:1:2 format with the stoichiometry of one FZD plus one different FZD plus two LRPs) yielded highly potent and efficacious surrogate molecules (FIG. 21H). To further confirm this, a molecule with F2 and F3 and one copy of LRP binder L2 was constructed (1:1:1:0 format with the stoichiometry of one FZD plus one different FZD plus one LRP binder, Table 6B and FIG. 21I). This molecule is also highly active (FIG. 21J), even though F2 or F3 alone with one copy of L2 showed no activity (FIG. 20). Since F2 and F3 bind to different FZDs, these results suggest that heterodimerization of FZD leads to β-catenin dependent signaling.

[0358] As a final configuration, we also constructed surrogate molecules with two different FZD binding arms and two different LRP binding arms (1:1:1:1 format) as depicted in FIG. 21K. It is interesting to note that although surrogate molecules containing the LRP binder L1 consistently yielded much lower Emax compared to WNT3A, when combined with L2 in the context of 1:1:1:1 format, yielded highly potent and efficacious molecules (FIG. 21L).

[0359] All the observation together demonstrate a new surrogate WNT platform that is flexible, can produce any FZD/LRP specificity combination, and can generate highly potent and active molecules.

[0360] The various embodiments described above can be combined to provide further embodiments. All of the U.S. patents, U.S. patent application publications, U.S. patent applications, foreign patents, foreign patent applications and non-patent publications referred to in this specification and/or listed in the Application Data Sheet are incorporated herein by reference, in their entirety. Aspects of the embodiments can be modified, if necessary to employ concepts of the various patents, applications and publications to provide yet further embodiments. These and other changes can be made to the embodiments in light of the above-detailed description.

[0361] In general, in the following claims, the terms used should not be construed to limit the claims to the specific embodiments disclosed in the specification and the claims, but should be construed to include all possible embodiments along with the full scope of equivalents to which such claims are entitled. Accordingly, the claims are not limited by the disclosure.

The application's sequence listing, which the Patent Office published only in electronic form, follows.

SEQUENCE LISTING (2260 sequences)

SEQ ID NO: 1 - protein, 227 aa, Artificial Sequence
  Made in Lab - Synthesized variable heavy chain sequence
QLQLQESGSGLVKPSQTLSLTCAVSGGSISSGGYSWSWIRQPPGKGLEWIGSIYHSGSTYYNPSLKSRLTISVDTSKNQFSLKLSSVTAADTAVYYCARFYYDILTGYSYFDYWGQGTLVTVSSASTKGPSVFPLAPSSKSTSGGTAALGCLVKDYFPEPVTVSWNSGALTSGVHTFPAVLQSSGLYSLSSVVTVPSSSLGTQTYICNVNHKPSNTKVDKKVEPKSC

SEQ ID NO: 2 - protein, 223 aa, Artificial Sequence
  Made in Lab - Synthesized variable heavy chain sequence
QVQLQESGPGLVKPSETLSLTCTVSGGSISGNNYYWGWIRQPPGKGLEWIGSIYFTGGTYYNPSLKSRVTISVDTSKNQFSLKLSSVTAADTAVYYCARVMLITDAFDIWGQGTMVTVSSASTKGPSVFPLAPSSKSTSGGTAALGCLVKDYFPEPVTVSWNSGALTSGVHTFPAVLQSSGLYSLSSVVTVPSSSLGTQTYICNVNHKPSNTKVDKKVEPKSC

SEQ ID NO: 3 - protein, 224 aa, Artificial Sequence
  Made in Lab - Synthesized variable heavy chain sequence
QVQLQESGPGLVKPSETLSLTCTVSGGAISGTSYFWGWIRQPPGKGLEWIGSIYYTGNTYYNPSLKSRLTVSVDTSKNQFSLNLNSVTAADTATYYCARIGIAVAAPVDHWGQGTLVTVSSASTKGPSVFPLAPSSKSTSGGTAALGCLVKDYFPEPVTVSWNSGALTSGVHTFPAVLQSSGLYSLSSVVTVPSSSLGTQTYICNVNHKPSNTKVDKKVEPKSC

SEQ ID NO: 4 - protein, 223 aa, Artificial Sequence
  Made in Lab - Synthesized variable heavy chain sequence
QVQLQESGPGLVKPSETLSLTCTVSGGSISSSSYYWGWIRQHPGKGLEWIGYIYYSGSTYYNPSLKSRVTISVDTSKNQFSLKLNSVTAADTAVYYCARATYGGDAFDIWGQGTMVTVSSASTKGPSVFPLAPSSKSTSGGTAALGCLVKDYFPEPVTVSWNSGALTSGVHTFPAVLQSSGLYSLSSVVTVPSSSLGTQTYICNVNHKPSNTKVDKKVEPKSC

SEQ ID NO: 5 - protein, 230 aa, Artificial Sequence
  Made in Lab - Synthesized variable heavy chain sequence
QLQLQESGPGLVKPSQTLSLTCTVSGGSISSGGYYWSWIRQHPGKGLEWIGYIYYSGSTYYNPSLKSRVTISVDKSKNQFSLKLSSVTAADTAVYYCARVRDYYDSSGYYYDYFDYWGQGTLVTVSSASTKGPSVFPLAPSSKSTSGGTAALGCLVKDYFPEPVTVSWNSGALTSGVHTFPAVLQSSGLYSLSSVVTVPSSSLGTQTYICNVNHKPSNTKVDKKVEPKSC

SEQ ID NO: 6 - protein, 227 aa, Artificial Sequence
  Made in Lab - Synthesized variable heavy chain sequence
QVQLQQWGAGLLKPSETLSLTCAVSGASFSGHYWTWIRQPPGKGLEWIGEIDHTGSTNYEPSLRSRVTISVDTSKNQFSLNLKSVTAADTAVYYCARGGQGGYDWGHYHGLDVWGQGTTVTVSSASTKGPSVFPLAPSSKSTSGGTAALGCLVKDYFPEPVTVSWNSGALTSGVHTFPAVLQSSGLYSLSSVVTVPSSSLGTQTYICNVNHKPSNTKVDKKVEPKSC

SEQ ID NO: 7 - protein, 225 aa, Artificial Sequence
  Made in Lab - Synthesized variable heavy chain sequence
EVQLLQSGAEVKKPGSSVKVSCKASGGTFTYRYLHWVRQAPGQGLEWMGGIIPIFGTGNYAQKFQGRVTITADESTSTAYMELSSLRSEDTAVYYCASSMVRVPYYYGMDVWGQGTLVTVSSASTKGPSVFPLAPSSKSTSGGTAALGCLVKDYFPEPVTVSWNSGALTSGVHTFPAVLQSSGLYSLSSVVTVPSSSLGTQTYICNVNHKPSNTKVDKKVEPKSC

SEQ ID NO: 8 - protein, 122 aa, Artificial Sequence
  Made in Lab - Synthesized variable heavy chain sequence
EVQLVESGGGLVQAGGSLRLSCTASGSTFSNYAMGWFRQAPGKEREFVAAISWGGGSTFYSGSVKGRFTISRDSAKNTVHLQMDSLIPEDTAVYYCAAGPIARWYRGDMDYWGKGTLVTVSS

SEQ ID NO: 9 - protein, 122 aa, Artificial Sequence
  Made in Lab - Synthesized variable heavy chain sequence
DVQLVESGGGLVQTGGSLRLSCVASGRTFRAYAMGWFRQAPGKEREFVSAISWSGGSTYYAGSVKGRFTISRDSAKNTVHLQMDSLIPEDTAVYYCAAGPIARWYRGDMDYWGKGTLVTVSS

SEQ ID NO: 10 - protein, 122 aa, Artificial Sequence
  Made in Lab - Synthesized variable heavy chain sequence
QVQLVESGGGLVQPGGSLRLSCAASGFTFREYAMTWVRQSPGKRLEWVSGISRDGGRTSYSDSLKGRFTISRDNAKNTLYLQMNNLTPEDTAVYYCAPRVLVTAPSGGMDYWGKGTQVTVSS

SEQ ID NO: 11 - protein, 122 aa, Artificial Sequence
  Made in Lab - Synthesized variable heavy chain sequence
AVQLVDSGGGLMQAGGSLRLSCAASGRTFGTWAMGWFRQAPGKEREFVAAISYNGFSTYYSDAVKGRFTISRDNAKNTMYLQMDSLIPEDTAVYYCAAGPIARWYRGDMDYWGKGTQVTVSS

SEQ ID NO: 12 - protein, 122 aa, Artificial Sequence
  Made in Lab - Synthesized variable heavy chain sequence
AVQLVESGGGLVQAGGPLRLSCAASGRTSSSYAMGWFRQAPGKEREFVAAISWSGGSTYYADSVKGRFTISRDNAKNTVYLQMDSPIPEDTAVYYCAAGPIARWYRGDMDYWGKGTLVTVSS

SEQ ID NO: 13 - protein, 122 aa, Artificial Sequence
  Made in Lab - Synthesized variable heavy chain sequence
AVQLVESGGGLVQAGGSLRLSCTASGRTFSSYAMGWFRQAPGKEREFVAAISWSGRSTYYADSVKGRFTISRDNAKNTVYLQMNSLKSEDTAAYYCAAGPIARWYRGDMDYWGKGTLVTVSS

SEQ ID NO: 14 - protein, 124 aa, Artificial Sequence
  Made in Lab - Synthesized variable heavy chain sequence
DVQLVESGGGLVQAGGSLRLSCAASGRTFSSYAMGWFRQAPGKEREFVAAISWSGGSTYYADSVKGRFTISRDNAKNTVYLQMNSLKPEDTAVYYCAAGPNYSWFMPSSSRLIWGQGTLVTVSS

SEQ ID NO: 15 - protein, 124 aa, Artificial Sequence
  Made in Lab - Synthesized variable heavy chain sequence
QVKLEESGGGLVQAGGSLRLSCAASGGTSSTYAMGWFRQAPGKEREFVAAINRSGGSTYYADSVKGRFTISRDNAKNTVYLQMNSLNPEDTAVYYCAAVFLSRNYEIQEYYRYQGQGTQVTVSS

SEQ ID NO: 16 - protein, 224 aa, Artificial Sequence
  Made in Lab - Synthesized variable heavy chain sequence
QVQLVQSGAEVKKPGASVKVSCKASGGTFSSYAISWVRQAPGQGLEWMGWISTYNGATNYARKFQGRVTMTRDTSTSTVYMELSSLRSEDTAVYYCARGGAGRFGEGMDVWGQGTLVTVSSASTKGPSVFPLAPSSKSTSGGTAALGCLVKDYFPEPVTVSWNSGALTSGVHTFPAVLQSSGLYSLSSVVTVPSSSLGTQTYICNVNHKPSNTKVDKKVEPKSC

SEQ ID NO: 17 - protein, 225 aa, Artificial Sequence
  Made in Lab - Synthesized variable heavy chain sequence
EVQLVQSGAEVKKPGASVKVSCKASGYTFTSYGISWVRQAPGQGLEWMGWISAYNGNTNYAQKLQGRVTMTTDTSTSTAYMELRSLRSDDTAVYYCASSKEKATYYYGMDVWGQGTTVTVSSASTKGPSVFPLAPSSKSTSGGTAALGCLVKDYFPEPVTVSWNSGALTSGVHTFPAVLQSSGLYSLSSVVTVPSSSLGTQTYICNVNHKPSNTKVDKKVEPKSC

SEQ ID NO: 18 - protein, 232 aa, Artificial Sequence
  Made in Lab - Synthesized variable heavy chain sequence
QVQLVQSGAEVKKPGSSVKVSCKASGYTFTNNFMHWVRQAPGQGLEWMGWINPNSGGTKYAQKFQGRVTITADESTSTAYMELSSLRSEDTAVYYCARSVGEVGATMLGIGVWYWFDPWGQGTLVTVSSASTKGPSVFPLAPSSKSTSGGTAALGCLVKDYFPEPVTVSWNSGALTSGVHTFPAVLQSSGLYSLSSVVTVPSSSLGTQTYICNVNHKPSNTKVDKKVEPKSC

SEQ ID NO: 19 - protein, 221 aa, Artificial Sequence
  Made in Lab - Synthesized variable heavy chain sequence
EVQLVESGGGLVKPGGSLRLSCAASGFNFGIYSMTWVRQAPGKGLEWISYISGDSGYTNYADSVKGRFTISRDDSKNTLYLQMNSLKTEDTAVYYCARVGPGGWFDPWGQGTLVTVSSASTKGPSVFPLAPSSKSTSGGTAALGCLVKDYFPEPVTVSWNSGALTSGVHTFPAVLQSSGLYSLSSVVTVPSSSLGTQTYICNVNHKPSNTKVDKKVEPKSC

SEQ ID NO: 20 - protein, 226 aa, Artificial Sequence
  Made in Lab - Synthesized variable heavy chain sequence
QVQLVQSGAEVKKPGASVKVSCKASGYTFTNNFMHWVRQAPGQGLEWMGRINPNSGGTNYAQKFQGRVTMTRDTSTSTVYMELSSLRSEDTAVYYCASQNYYGSGSYPGFDYWGQGTLVNVSSASTKGPSVFPLAPSSKSTSGGTAALGCLVKDYFPEPVTVSWNSGALTSGVHTFPAVLQSSGLYSLSSVVTVPSSSLGTQTYICNVNHKPSNTKVDKKVEPKSC

SEQ ID NO: 21 - protein, 223 aa, Artificial Sequence
  Made in Lab - Synthesized variable heavy chain sequence
QVQLVQSGAEVKKPGSSVKVSCKASGYTFTYRYLHWVRQAPGQGLEWMGGIIPIFGTANYAQKFQGRVTITADESTSTAYMELSSLRSEDTAVYYCATHDSSGYYSFDYWGQGTLVTVSSASTKGPSVFPLAPSSKSTSGGTAALGCLVKDYFPEPVTVSWNSGALTSGVHTFPAVLQSSGLYSLSSVVTVPSSSLGTQTYICNVNHKPSNTKVDKKVEPKSC

SEQ ID NO: 22 - protein, 221 aa, Artificial Sequence
  Made in Lab - Synthesized variable heavy chain sequence
QVQLVQSGAEVKKPGASVKVSCKASGYTFTNNFMHWVRQAPGQGLEWMGGFDPEDGETIYAQKFQGRVTMTRDTSTSTVYMELSSLRSEDTAVYYCARVGRGYSFDYWGQGTLVTVSSASTKGPSVFPLAPSSKSTSGGTAALGCLVKDYFPEPVTVSWNSGALTSGVHTFPAVLQSSGLYSLSSVVTVPSSSLGTQTYICNVNHKPSNTKVDKKVEPKSC

SEQ ID NO: 23 - protein, 218 aa, Artificial Sequence
  Made in Lab - Synthesized variable heavy chain sequence
EVQLVESGGGLVQPGGSLRLSCAASGFTFSDHYMSWVRQAPGKGLEWVALVGYDGSQQFYGESVKGRFTISRDNSKNTLYLQMNSLRAEDTAVYYCNTGIPMLYWGQGTLVTVSSASTKGPSVFPLAPSSKSTSGGTAALGCLVKDYFPEPVTVSWNSGALTSGVHTFPAVLQSSGLYSLSSVVTVPSSSLGTQTYICNVNHKPSNTKVDKKVEPKSC

SEQ ID NO: 24 - protein, 223 aa, Artificial Sequence
  Made in Lab - Synthesized variable heavy chain sequence
QVQLVQSGAEVKKPGSSVKVSCKASGGTFSSYAISWVRQAPGQGLEWMGRIIPILGIANYAQKFQGRVTITADESTSTAYMELSSLRSEDTAVYYCARESVNNYYYMDVWGKGTTVTVSSASTKGPSVFPLAPSSKSTSGGTAALGCLVKDYFPEPVTVSWNSGALTSGVHTFPAVLQSSGLYSLSSVVTVPSSSLGTQTYICNVNHKPSNTKVDKKVEPKSC

SEQ ID NO: 25 - protein, 228 aa, Artificial Sequence
  Made in Lab - Synthesized variable heavy chain sequence
QVQLVQSGAEVKKPGASVKVSCKASGYTFTNNFMHWVRQAPGQGLEWMGRINPNSGGTNYAQKFQGRVTMTRDTSTSTVYMELSSLRSEDTAVYYCARGQGYSSGWYRGDAFDIWGQGTTVTVSSASTKGPSVFPLAPSSKSTSGGTAALGCLVKDYFPEPVTVSWNSGALTSGVHTFPAVLQSSGLYSLSSVVTVPSSSLGTQTYICNVNHKPSNTKVDKKVEPKSC

SEQ ID NO: 26 - protein, 227 aa, Artificial Sequence
  Made in Lab - Synthesized variable heavy chain sequence
QVQLVQSGAEVKKPGASVKVSCKASGFTFTSSAVQWVRQAPGQGLEWMGWMNPNSGNTGYAQKFQGRVTMTRDTSTSTVYMELSSLRSEDTAVYYCARGRGQQWLTGYYGMDVWGQGTTVTVSSASTKGPSVFPLAPSSKSTSGGTAALGCLVKDYFPEPVTVSWNSGALTSGVHTFPAVLQSSGLYSLSSVVTVPSSSLGTQTYICNVNHKPSNTKVDKKVEPKSC

SEQ ID NO: 27 - protein, 225 aa, Artificial Sequence
  Made in Lab - Synthesized variable heavy chain sequence
EVQLVESGGGLVQPGGSLRLSCAASGFAFSSHWMHWVRQAPGKGLEWVSAIDGSGGSTYYADSVKGRFTISRDNSKNTLYLQMNSLRAEDTAVYYCARDRQLGWAHWYFDLWGRGTLVTVSSASTKGPSVFPLAPSSKSTSGGTAALGCLVKDYFPEPVTVSWNSGALTSGVHTFPAVLQSSGLYSLSSVVTVPSSSLGTQTYICNVNHKPSNTKVDKKVEPKSC

SEQ ID NO: 28 - protein, 227 aa, Artificial Sequence
  Made in Lab - Synthesized variable heavy chain sequence
EVQLVQSGGGLVQPGGSLRLSCAASGFNLRRYNMNWVRQAPGKGLEWVSRISNSGSLVYYADSVKGRFTISRDNSKNTLYLQMNSLRAEDTAVYYCARDADSSGYYRYDAFDIWGQGTMVTVSSASTKGPSVFPLAPSSKSTSGGTAALGCLVKDYFPEPVTVSWNSGALTSGVHTFPAVLQSSGLYSLSSVVTVPSSSLGTQTYICNVNHKPSNTKVDKKVEPKSC

SEQ ID NO: 29 - protein, 221 aa, Artificial Sequence
  Made in Lab - Synthesized variable heavy chain sequence
QVQLVQSGAEVKKPGSSVKVSCKASGGAFSTSSISWVRQAPGQGLEWVGRIIPVLGTANYAQKFQGRVTITADESTSTAYMELSSLRSEDTAVYYCAKGGWRSSFDPWGQGTLVTVSSASTKGPSVFPLAPSSKSTSGGTAALGCLVKDYFPEPVTVSWNSGALTSGVHTFPAVLQSSGLYSLSSVVTVPSSSLGTQTYICNVNHKPSNTKVDKKVEPKSC

SEQ ID NO: 30 - protein, 223 aa, Artificial Sequence
  Made in Lab - Synthesized variable heavy chain sequence
QVQLVQSGAEVKKPGASVKVSCKASGYTFTSYDINWVRQAPGQGLEWMGGFDPEDGETIYAQKFQGRVTMTRDTSTSTVYMELSSLRSEDTAVYYCAKAGDWGLYGMDVWGQGTMVTVSSASTKGPSVFPLAPSSKSTSGGTAALGCLVKDYFPEPVTVSWNSGALTSGVHTFPAVLQSSGLYSLSSVVTVPSSSLGTQTYICNVNHKPSNTKVDKKVEPKSC

SEQ ID NO: 31 - protein, 230 aa, Artificial Sequence
  Made in Lab - Synthesized variable heavy chain sequence
QVQLVQSGAEVKKPGASVKVSCKASGYTFTNNFMHWVRQAPGQGLEWMGWINPNSGDTKFAPKFQGRVTMTRDTSTSTVYMELSSLRSEDTAVYYCAREANYDILTGYIRPDAFDIWGQGTTVTVSSASTKGPSVFPLAPSSKSTSGGTAALGCLVKDYFPEPVTVSWNSGALTSGVHTFPAVLQSSGLYSLSSVVTVPSSSLGTQTYICNVNHKPSNTKVDKKVEPKSC

SEQ ID NO: 32 - protein, 224 aa, Artificial Sequence
  Made in Lab - Synthesized variable heavy chain sequence
QVQLVQSGAEVKKPGASVKVSCKASGYTFTSYYMNWVRQAPGQGLEWMGIISPSGGSTSYAQKFQGRVTMTRDTSTSTVYMELSSLRSEDTAVYYCARWGDYGDLYYFDYWGQGTLVTVSSASTKGPSVFPLAPSSKSTSGGTAALGCLVKDYFPEPVTVSWNSGALTSGVHTFPAVLQSSGLYSLSSVVTVPSSSLGTQTYICNVNHKPSNTKVDKKVEPKSC

SEQ ID NO: 33 - protein, 228 aa, Artificial Sequence
  Made in Lab - Synthesized variable heavy chain sequence
QVQLVQSGAEVKKPGASVKVSCKASGYIFTDYYMHWVRQAPGQGLEWMGWMNPNSGNTGYAQKFQGRVTMTRDTSTSTVYMELSSLRSEDTAVYYCARGGSRYDFWSGHWYFDLWGRGTLVTVSSASTKGPSVFPLAPSSKSTSGGTAALGCLVKDYFPEPVTVSWNSGALTSGVHTFPAVLQSSGLYSLSSVVTVPSSSLGTQTYICNVNHKPSNTKVDKKVEPKSC

SEQ ID NO: 34 - protein, 227 aa, Artificial Sequence
  Made in Lab - Synthesized variable heavy chain sequence
EVQLVQSGGGLVKPGGSLRLSCAASGFTFSSYSMNWVRQAPGKGLEWVSYIENDGSITTYADSVKGRFTISRDDSKNTLYLQMNSLKTEDTAVYYCARAPYYYGSGSLFRLDYWGQGTLVTVSSASTKGPSVFPLAPSSKSTSGGTAALGCLVKDYFPEPVTVSWNSGALTSGVHTFPAVLQSSGLYSLSSVVTVPSSSLGTQTYICNVNHKPSNTKVDKKVEPKSC

SEQ ID NO: 35 - protein, 219 aa, Artificial Sequence
  Made in Lab - Synthesized variable heavy chain sequence
EVQLVESGGGLVKPGGSLRLSCAASGFTFSSYAMHWVRQAPGKGLEWVSAIGAGGGTYYADSVKGRFTISRDDSKNTLYLQMNSLKTEDTAVYYCARDAYNWFDPWGQGTLVTVSSASTKGPSVFPLAPSSKSTSGGTAALGCLVKDYFPEPVTVSWNSGALTSGVHTFPAVLQSSGLYSLSSVVTVPSSSLGTQTYICNVNHKPSNTKVDKKVEPKSC

SEQ ID NO: 36 - protein, 222 aa, Artificial Sequence
  Made in Lab - Synthesized variable heavy chain sequence
EVQLVESGGGLVKPGGSLRLSCAASGFTFSNAQMSWVRQAPGKGLEWVSAIGTGGGTYYADSVKGRFTISRDDSKNTLYLQMNSLKTEDTAVYYCAREGSYYDWYFDLWGRGTLVTVSSASTKGPSVFPLAPSSKSTSGGTAALGCLVKDYFPEPVTVSWNSGALTSGVHTFPAVLQSSGLYSLSSVVTVPSSSLGTQTYICNVNHKPSNTKVDKKVEPKSC

SEQ ID NO: 37 - protein, 116 aa, Artificial Sequence
  Made in Lab - Synthesized variable heavy chain sequence
AVQQVESGGGLVQPGGSLRLSCAASGFTLDYYAISWFRQAPGKKRELVADITSGGSTNYADSVKGRFTISRDNAKNTIYLQMNSLKPEDTAVYFCNAVTYNGYTIWGQGTQVTVSS

SEQ ID NO: 38 - protein, 220 aa, Artificial Sequence
  Made in Lab - Synthesized variable light chain sequence
DIVMTHTPLSLSVTPGEPASISCRSSRSLLDTDDGNTYLDWYLQKPGQSPQLLIHTLSHRASGVPDRFSGSGSGTDFTLKISRVEAEDVGVYYCMQSIQLPWTFGQGTKVEIKRTVAAPSVFIFPPSDEQLKSGTASVVCLLNNFYPREAKVQWKVDNALQSGNSQESVTEQDSKDSTYSLSSTLTLSKADYEKHKVYACEVTHQGLSSPVTKSFNRGEC

SEQ ID NO: 39 - protein, 219 aa, Artificial Sequence
  Made in Lab - Synthesized variable light chain sequence
DVVMTQSPLSLPVTPGEPASISCRSSQSLLHSNGYNYLDWYLQKPGQSPQLLIYLGSNRASGVPDRFSGSGSGTDFTLKISRVEAEDVGVYYCMQGTHWPYTFGQGTKLEIKRTVAAPSVFIFPPSDEQLKSGTASVVCLLNNFYPREAKVQWKVDNALQSGNSQESVTEQDSKDSTYSLSSTLTLSKADYEKHKVYACEVTHQGLSSPVTKSFNRGEC

SEQ ID NO: 40 - protein, 214 aa, Artificial Sequence
  Made in Lab - Synthesized variable light chain sequence
EIVLTQSPATLSLSPGEGATLSCRASQSVGTYLTWYRQKPGQAPRLLIYDASNRATGIPARFSGSGAGTDFTLKISRVEAEDVGVYYCMQATQFPLTFGQGTKVEIKRTVAAPSVFIFPPSDEQLKSGTASVVCLLNNFYPREAKVQWKVDNALQSGNSQESVTEQDSKDSTYSLSSTLTLSKADYEKHKVYACEVTHQGLSSPVTKSFNRGEC

SEQ ID NO: 41 - protein, 217 aa, Artificial Sequence
  Made in Lab - Synthesized variable light chain sequence
QSVVTQPPSVSGAPGQRVTISCTRSSSNIGAGYDVHWYQQHPGTAPKLLIFGNSIRPSGVPDRFSGSKSGTSATLGITGLQTGDEADYYCGTWDSSLSAWVFGGGTKLTVLGQPKAAPSVTLFPPSSEELQANKATLVCLISDFYPGAVTVAWKADSSPVKAGVETTTPSKQSNNKYAASSYLSLTPEQWKSHRSYSCQVTHEGSTVEKTVAPTECS

SEQ ID NO: 42 - protein, 214 aa, Artificial Sequence
  Made in Lab - Synthesized variable light chain sequence
DIQLTQSPSSLSASVGDRVTITCRASRSISSYFNWYQQKPGKAPKLLIYAASSLQSGVPSRFSGSRSGTDFTLTISSLQPEDFATYYCQQADTFPPTFGQGTRLEIKRTVAAPSVFIFPPSDEQLKSGTASVVCLLNNFYPREAKVQWKVDNALQSGNSQESVTEQDSKDSTYSLSSTLTLSKADYEKHKVYACEVTHQGLSSPVTKSFNRGEC

SEQ ID NO: 43 - protein, 213 aa, Artificial Sequence
  Made in Lab - Synthesized variable light chain sequence
SYVLTQPPSVSVSPGQTASITCSGDKVGHKYASWYQQKPGQSPVLVIYEDSQRPSGIPVRFSGSNSGNTATLTISGTQAMDEADYYCQAWDSSTDVVFGGGTKLTVLGQPKAAPSVTLFPPSSEELQANKATLVCLISDFYPGAVTVAWKADSSPVKAGVETTTPSKQSNNKYAASSYLSLTPEQWKSHRSYSCQVTHEGSTVEKTVAPTECS

SEQ ID NO: 44 - protein, 214 aa, Artificial Sequence
  Made in Lab - Synthesized variable light chain sequence
DIQMTQSPSSLSASVGDRVTITCRASQSISSYLNWYQQKPGKAPKLLIYAASSLQSGVPSRFSGSGSGTDFTLTISSLQPEDFATYYCQQSYSTPLTFGGGTKVEIKRTVAAPSVFIFPPSDEQLKSGTASVVCLLNNFYPREAKVQWKVDNALQSGNSQESVTEQDSKDSTYSLSSTLTLSKADYEKHKVYACEVTHQGLSSPVTKSFNRGEC

SEQ ID NO: 45 - protein, 214 aa, Artificial Sequence; identical to SEQ ID NO: 44
  Made in Lab - Synthesized variable light chain sequence

SEQ ID NO: 46 - protein, 216 aa, Artificial Sequence
  Made in Lab - Synthesized variable light chain sequence
QAVVLQEPSLSVSPGGTVTLTCGLSSGSVSTNYYPSWYQQTPGQAPRTLIYYTNTRSSDVPERFSGSIVGNKAALTITGAQPDDESVYFCLLYLGRGIWVFGGGTKLTVLGQPKAAPSVTLFPPSSEELQANKATLVCLISDFYPGAVTVAWKADSSPVKAGVETTTPSKQSNNKYAASSYLSLTPEQWKSHRSYSCQVTHEGSTVEKTVAPTECS

SEQ ID NO: 47 - protein, 214 aa, Artificial Sequence
  Made in Lab - Synthesized variable light chain sequence
DIQMTQSPSSLSASVGDRVTITCRASQSISSYLNWYQQKPGKAPKLLIYAASSLQSGVPSRFSGSGSGTDFTLTISSLQPEDFATYYCQQSYRTPFTFGPGTKVDIKRTVAAPSVFIFPPSDEQLKSGTASVVCLLNNFYPREAKVQWKVDNALQSGNSQESVTEQDSKDSTYSLSSTLTLSKADYEKHKVYACEVTHQGLSSPVTKSFNRGEC

SEQ ID NO: 48 - protein, 214 aa, Artificial Sequence
  Made in Lab - Synthesized variable light chain sequence
DIQMTQSPSSLSASVGDRVTITCRASQGISSYLAWYQQKPGKAPKLLIYAASNLLGGVPSRFSGSGSGTDFTLTISSLQPEDFATYYCQQTYSTPWTFGQGTKVEIKRTVAAPSVFIFPPSDEQLKSGTASVVCLLNNFYPREAKVQWKVDNALQSGNSQESVTEQDSKDSTYSLSSTLTLSKADYEKHKVYACEVTHQGLSSPVTKSFNRGEC

SEQ ID NO: 49 - protein, 214 aa, Artificial Sequence; identical to SEQ ID NO: 44
  Made in Lab - Synthesized variable light chain sequence

SEQ ID NO: 50 - protein, 214 aa, Artificial Sequence; identical to SEQ ID NO: 44
  Made in Lab - Synthesized variable light chain sequence

SEQ ID NO: 51 - protein, 214 aa, Artificial Sequence; identical to SEQ ID NO: 44
  Made in Lab - Synthesized variable light chain sequence

SEQ ID NO: 52 - protein, 214 aa, Artificial Sequence; identical to SEQ ID NO: 44
  Made in Lab - Synthesized variable light chain sequence

SEQ ID NO: 53 - protein, 214 aa, Artificial Sequence; identical to SEQ ID NO: 44
  Made in Lab - Synthesized variable light chain sequence

SEQ ID NO: 54 - protein, 214 aa, Artificial Sequence; identical to SEQ ID NO: 44
  Made in Lab - Synthesized variable light chain sequence

SEQ ID NO: 55 - protein, 214 aa, Artificial Sequence
  Made in Lab - Synthesized variable light chain sequence
DIQMTQSPSSLSASVGDRVTITCRASQGISSALAWYQQKPGKAPKLLIYGASTLQSGVPSRFSGSGSGTDFTLTISSLQPEDFATYYCLQDYNYPFTFGPGTKVDIKRTVAAPSVFIFPPSDEQLKSGTASVVCLLNNFYPREAKVQWKVDNALQSGNSQESVTEQDSKDSTYSLSSTLTLSKADYEKHKVYACEVTHQGLSSPVTKSFNRGEC

SEQ ID NO: 56 - protein, 214 aa, Artificial Sequence; identical to SEQ ID NO: 44
  Made in Lab - Synthesized variable light chain sequence

SEQ ID NO: 57 - protein, 214 aa, Artificial Sequence
  Made in Lab - Synthesized variable light chain sequence
EIVLTQSPATLSVSPGERATLSCRASQSVSSNLAWYQQKPGQAPRLLIYDASNRATGIPARFSGSGSGTEFTLTISSLQSEDFAVYYCQQRNNWLYTFGQGTKVEIKRTVAAPSVFIFPPSDEQLKSGTASVVCLLNNFYPREAKVQWKVDNALQSGNSQESVTEQDSKDSTYSLSSTLTLSKADYEKHKVYACEVTHQGLSSPVTKSFNRGEC

SEQ ID NO: 58 - protein, 214 aa, Artificial Sequence
  Made in Lab - Synthesized variable light chain sequence
EIVLTQSPATLSVSPGERATLSCRASQSVSSNLAWYQQKPGQAPRLLIYGASTRATGIPARFSGSGSGTEFTLTISSLQSEDFAVYYCQQYNSWPLTFGQGTKVEIKRTVAAPSVFIFPPSDEQLKSGTASVVCLLNNFYPREAKVQWKVDNALQSGNSQESVTEQDSKDSTYSLSSTLTLSKADYEKHKVYACEVTHQGLSSPVTKSFNRGEC

SEQ ID NO: 59 - protein, 214 aa, Artificial Sequence
  Made in Lab - Synthesized variable light chain sequence
DIQMTQSPSSLSASVGDRVTITCRASQSISRWLAWYQQKPGKAPKLLIYAASSLQSGVPSRFSGSGSGTDFTLTISSLQPEDFATYYCQQTNTFPFTFGPGTKVDIKRTVAAPSVFIFPPSDEQLKSGTASVVCLLNNFYPREAKVQWKVDNALQSGNSQESVTEQDSKDSTYSLSSTLTLSKADYEKHKVYACEVTHQGLSSPVTKSFNRGEC

SEQ ID NO: 60 - protein, 214 aa, Artificial Sequence
  Made in Lab - Synthesized variable light chain sequence
EIVLTQSPATLSVSPGERATLSCRASQSLRSKLAWYQQKPGQAPRLLIYGASTRATGIPARFSGSGSGTEFTLTISSLQSEDFAVYYCQQYANSPWTFGPGTKVDIKRTVAAPSVFIFPPSDEQLKSGTASVVCLLNNFYPREAKVQWKVDNALQSGNSQESVTEQDSKDSTYSLSSTLTLSKADYEKHKVYACEVTHQGLSSPVTKSFNRGEC

SEQ ID NO: 61 - protein, 214 aa, Artificial Sequence
  Made in Lab - Synthesized variable light chain sequence
DIQMTQSPSSLSASVGDRVTITCRASQGISSALAWYQQKPGKAPKLLIYATSTLQSGVPSRFSGSGSGTDFTLTISSLQPEDFATYYCQQVNSYPPTFGQGTKLEIKRTVAAPSVFIFPPSDEQLKSGTASVVCLLNNFYPREAKVQWKVDNALQSGNSQESVTEQDSKDSTYSLSSTLTLSKADYEKHKVYACEVTHQGLSSPVTKSFNRGEC

SEQ ID NO: 62 - protein, 214 aa, Artificial Sequence
  Made in Lab - Synthesized variable light chain sequence
DIQMTQSPSSLSASVGDRVTITCRASQGISNYLAWYQQKPGKAPKLLIYAASSLQSGVPSRFSGSGSGTDFTLTISSLQPEDFATYYCQQSYSTPFTFGQGTKVEIKRTVAAPSVFIFPPSDEQLKSGTASVVCLLNNFYPREAKVQWKVDNALQSGNSQESVTEQDSKDSTYSLSSTLTLSKADYEKHKVYACEVTHQGLSSPVTKSFNRGEC

SEQ ID NO: 63 - protein, 214 aa, Artificial Sequence; identical to SEQ ID NO: 44
  Made in Lab - Synthesized variable light chain sequence

SEQ ID NO: 64 - protein, 214 aa, Artificial Sequence; identical to SEQ ID NO: 44
  Made in Lab - Synthesized variable light chain sequence

SEQ ID NO: 65 - protein, 216 aa, Artificial Sequence
  Made in Lab - Synthesized variable light chain sequence
EIVLTQSPATLSVSPGERATLSCRASQNIGSRLAWYQQKPGQAPRLLIYGASNRASGIPARFSGSGSGTEFTLTISSLQSEDFAVYYCQQYNHWPPLFTFGPGTKVDIKRTVAAPSVFIFPPSDEQLKSGTASVVCLLNNFYPREAKVQWKVDNALQSGNSQESVTEQDSKDSTYSLSSTLTLSKADYEKHKVYACEVTHQGLSSPVTKSFNRGEC

SEQ ID NO: 66 - protein, 120 aa, Artificial Sequence
  Made in Lab - 004S-D01 Heavy Chain
EVQLVESGGGLVKPGGSLRLSCAASGFTFTNYAMSWVRQAPGKGLEWVSAISGSGGSTYYADSVKGRFTISRDDSKNTLYLQMNSLKTEDTAVYYCARATGFGTVVFDYWGQGTLVTVSS

SEQ ID NO: 67 - protein, 107 aa, Artificial Sequence [sequence omitted]

SEQ ID NO: 68 - protein, 119 aa, Artificial Sequence
  Mad in Lab - 004S-E09 Heavy Chain
QVQLVQSGAEVKKPGASVKVSCKASGDTFSNYVISWVRQAPGQGLEWMGRISAYNGYKSYAQNFQGRVTMTRDTSTSTVYMELSSLRSEDTAVYYCARSSGYVGWFDPWGQGTLVTVSS

SEQ ID NO: 69 - protein, 107 aa, Artificial Sequence [sequence omitted]

SEQ ID NO: 70 - protein, 229 aa, Artificial Sequence
  Made in Lab - FZD7-Fab-1791 Heavy chain
EVQPVESGGGLVQPKGSLKLSCAASGFTFNTYAMHWVRQAPGKGLEWVARIRSKSNNYAKNYDDSVKDRFTISRDDSQSMLYLQMNNLKTEDTAMYYCVRENYGGRFDYWGQGTTLTVSSAKTTPPSVYPLAPGSAAQTNSMVTLGCLVKGYFPEPVTVTWNSGSLSSGVHTFPAVLQSDLYTLSSSVTVPSSTWPSETVTCNVAHPASSTKVDKKIVPRDSHHHHHHH

SEQ ID NO: 71 - protein, 223 aa, Artificial Sequence
  Made in Lab - FZD7-Fab-1791 Light chain
DIVMTQSPKSMSMSVGERVTLRCKASENVLNYVSWYQQKPEQSPKLLIYGASNRYTGVPDRFTGSGSATDFTLTISSVQAEDLADYHCGQSYRYPTFGAGTKLELKRADAAPTVSIFPPSSEQLTSGGASVVCFLNNFYPKDINVKWKIDGSERQNGVLNSWTDQDSKDSTYSMSSTLTLTKDEYERHNSYTCEATHKTSTSPIVKSFNRNESYPYDVPDYAS

SEQ ID NO: 72 - protein, 228 aa, Artificial Sequence
  Made in Lab - FZD7-Fab-1291 Heavy chain
EVQLVESGGGLVKPGGSLKLSCAASGFTFSSYAMSWVRQTPEKRLEWVATISDGGSYTRYPDKLKGRFTISRDNAKNNLYLQMSHLKSEDTAMYYCARVGGRRDYFDYWGQGTTLTVSSAKTTPPSVYPLAPGSAAQTNSMVTLGCLVKGYFPEPVTVTWNSGSLSSGVHTFPAVLQSDLYTLSSSVTVPSSTWPSETVTCNVAHPASSTKVDKKIVPRDCHHHHHHH

SEQ ID NO: 73 - protein, 229 aa, Artificial Sequence
  Made in Lab - FZD7-Fab-1291 Light chain
DVVMSQSPSSLAVSVGEKVTMSCKSSQSLLYSSNQKNYLAWYQQKPGQSPKLLIYWASTRESGVPDRFTGSGSGTDFTLTISSVKAKDLAVYYCQQYYSYPTFGGGTKLEIKRADAAPTVSIFPPSSEQLTSGGASVVCFLNNFYPKDINVKWKIDGSERQNGVLNSWTDQDSKDSTYSMSSTLTLTKDEYERHNSYTCEATHKTSTSPIVKSFNRNESYPYDVPDYAS

SEQ ID NO: 74 - protein, 124 aa, Artificial Sequence
  Made in lab - synthesized variable heavy chain
QVQLVESGGGLVQAGGSLRLSCAASGRTFSSYAMSWFRQAPGKEREFVAVIGRSGGIKYYADSVKGRFTISRDNTINTVYLQMNNLTPEDTAIYYCATRRPFNSYNTEQSYDSWGRGTLVTVSS

SEQ ID NO: 75 - protein, 121 aa, Artificial Sequence
  Made in lab - synthesized variable heavy chain
AVQLVESGGGLVQAGGSLRLSCGVSGSIFSIYAMGWYRQAPGKERELVAVITSGGKTVYADSVKGRFTITEDAAKNTVYLQMNSLKAEDTAVYYCYADSRSSWYDEYLEHWGRGTLVTVSS

SEQ ID NO: 76 - protein, 119 aa, Artificial Sequence
  Made in lab - synthesized variable heavy chain
QVQLVESGGGLVQAGDSLRLSCVVSGRTFSVYGVGWFRQAPGKEREVVAAVSASGGYTWYADSVKGRFTISRDNAKSTAFLQMNSLQPEDTAVYYCKAAPRWGGATAYWGQGTQVTVSS

SEQ ID NO: 77 - protein, 119 aa, Artificial Sequence
  Made in lab - synthesized variable heavy chain
DVQLVESGGGLVQPGGSLRLSCAAPGSIFSDGAMGWYRQAPGKQRELVAVISGGRTGYADFVKGRFTISRDNGKNTVNLQMNRLEPEDTAVYFCNTYPFPIYKKGYPFWGQGTQVTVSS

SEQ ID NO: 78 - protein, 124 aa, Artificial Sequence
  Made in lab - synthesized variable heavy chain
DVQLVESGGGLVQAGGSLRLSCAASGRTFSSYAMSWFRQAPGKEREFVAVIGRSGGIKYYADSVKGRFTISRDNTINTVYLQMNNLTPEDTAIYYCATRRPFNSYNTEQSYDSWGRGTLVTVSS

SEQ ID NO: 79 - protein, 121 aa, Artificial Sequence
  Made in lab - synthesized variable heavy chain
DVQLVESGGGLVQAGESLRLSCAASGSIFSINTMGWYRQAPGKERELVAVITSGGKTVYADSVKGRFTITEDAAKNTVYLQMNSLKAEDTAVYYCYADSRSSWYDEYLEHWGQGTLVTVSS

SEQ ID NO: 80 - protein, 122 aa, Artificial Sequence
  Made in lab - synthesized variable heavy chain
AVQLVESGGGLVQAGGSLRLSCAASGRTLSAYDMGWFRQAPGKERELVGGIRWSGGTTLYPDSVKGRFTISRDNAKNTVYLQMNSLKPEDSAVYYCYARTVIGGFGAFRAHWGQGTQVTVSS

SEQ ID NO: 81 - protein, 119 aa, Artificial Sequence
  Made in lab - synthesized variable heavy chain
DVQLVESGGGLVQPGGSLRLSCAASGSIFMINTMAWYRQAPGNQRELVATIRPVVSETTYADAVKGRFTISRDNAKNTVYLQMNSLKSEDTAIYYCNAKRPWGTRDEYWGQGTLVTVSS

SEQ ID NO: 82 - protein, 122 aa, Artificial Sequence
  Made in lab - synthesized variable heavy chain
QVKLEESGGGLVQPGGSLRLSCETSATIVSIYRINWYRQAPGKQREWVAGITSSGRTIYADSVKGRFTISRDNAKNTVYLQMNNLKPEDTAVYYCNAASTVTAWPYYGPDYWGKGTLVTVSS

SEQ ID NO: 83 - protein, 119 aa, Artificial Sequence
  Made in lab - synthesized variable heavy chain
DVQLVESGGGLVQAGGSLRLACAGSGRIFAIYDIAWYRHPPGNQRELVAMIRPVVTEIDYADSVKGRFTISRNNAMKTVYLQMNNLKPEDTAVYYCNAKRPWGSRDEYWGQGTQVTVSS

SEQ ID NO: 84 - protein, 124 aa, Artificial Sequence
  Made in lab - synthesized variable heavy chain
AVQLVESGGGVVQAGDSLTLSCTMSGRSLSSFAMGWFRRAPGKEREFVARISRGDGYTDEADSVKGRFTISRDNAKNTVYLQMNNVGPEDTAVYHCAAVQAVIGGTLTTAYDYWGQGTLVTVSS

SEQ ID NO: 85 - protein, 124 aa, Artificial Sequence
  Made in lab - synthesized variable heavy chain
EVQLVESGGGLVQAGGSLRVSCAASGGTFSRYHMGWFRQAPGKEREFVSAITWSGGRTYYADFVKGRFTISRDDARNTVYLQMSSLKPEDTAVYYCALTWAPTPTNRRSDYAYWGQGTQVTVSS

SEQ ID NO: 86 - protein, 119 aa, Artificial Sequence
  Made in lab - synthesized variable heavy chain
EVQLVESGGGLVQAGGSLRLACAGSGRIFAIYDMAWYRQAPGNQRELVATIRPVVSETTYADAVKGRFTISRSNAMKTVYLQMNSLKSEDTAIYYCNAKRPWGTRDEYWGQGTLVTVSS

SEQ ID NO: 87 - protein, 126 aa, Artificial Sequence
  Made in lab - synthesized variable heavy chain
AVQLVDSGGGLVQAGDSLTLSCAASGRTFSDYSMGWFRQAPGKEREFVAGISWIADNRYYADVVKGRFTISRDNAKNTVYLQMNSLKPEDTAVYYCTAGRSRYLYGSSLNGPYDYWGQGTQVTVSS

SEQ ID NO: 88 - protein, 119 aa, Artificial Sequence
  Made in lab - synthesized variable heavy chain
AVQLVESGGGLVQAGGSLRLACAGSGRIFAIYDIAWYRQAPGNQRELVATIRPVVSETTYADAVKGRFTISRSNAMKTVYLQMNSLKSEDTAIYYCNAKRPWGTRDEYWGQGTLVTVSS

SEQ ID NO: 89 - protein, 121 aa, Artificial Sequence
  Made in lab - synthesized variable heavy chain
AVQLVDSGGGLVQAGGSLRLSCAVSGRTFSMYDMGWFRQAPGKEREFVASIRWSSGNTWYADSMKGRFTISRDNAKNTVYLQMNSLKPEDTAVYYCYANIYYTRRAPEEYWGQGTLVTVSS

SEQ ID NO: 90 - protein, 119 aa, Artificial Sequence
  Made in lab - synthesized variable heavy chain
EVQLVESGGGLVQPGGSLRLSCAVSRNIFPIDDMSWYRQAPGKQRELVATVTSGGRINYADSVKGRFTISRDGARRTIDLQMNNLKPEDTAVYYCNVDRTLYGKYKEYWGQGTLVTVSS

SEQ ID NO: 91 - protein, 111 aa, Artificial Sequence
  Made in lab - synthesized variable heavy chain
QVKLEESGGGLVQAGGSLRLSCAASGRIFSIYDMGWFRQAPGKEREFVSGIRWSGGTSYADSVKGRFTISKDNAKNTIYLQMNNLKAEDTAVYYCGSRGYWGQGTLVTVSS

SEQ ID NO: 92 - protein, 119 aa, Artificial Sequence; identical to SEQ ID NO: 88
  Made in lab - synthesized variable heavy chain

SEQ ID NO: 93 - protein, 121 aa, Artificial Sequence; identical to SEQ ID NO: 89
  Made in lab - synthesized variable heavy chain

SEQ ID NO: 94 - protein, 126 aa, Artificial Sequence
  Made in lab - synthesized variable heavy chain
EVQLVESGGGLVQAGGSLRLSCATSGRTFNTYAMGWFRQAPGKEREFVASVSWRYDRTYYTDTVKGRFTISRDNAKNTVYLQMNSLKPEDTAVYFCAADTNWRAGPRVGIDEYAYWGQGTLVTVSS

SEQ ID NO: 95 - protein, 119 aa, Artificial Sequence; identical to SEQ ID NO: 90
  Made in lab - synthesized variable heavy chain

SEQ ID NO: 96 - protein, 111 aa, Artificial Sequence; identical to SEQ ID NO: 91
  Made in lab - synthesized variable heavy chain

SEQ ID NO: 97 - protein, 117 aa, Artificial Sequence
  Made in Lab - 008S-D01 Heavy Chain
DVQLVESGGGLVQPGGSLRLSCTSSANINSIETLGWYRQAPGKQRELIANMRGGGYMKYAGSLKGRFTMSTESAKNTMYLQMNSLKPEDTAVYYCYVKLRDDDYVYRGQGTQVTVSS

SEQ ID NO: 98 - protein, 50 aa, Homo sapiens
CVGQNTSDKGTPTPSLLPEFWTSNPQHGGGGHRGGFPGGAGASERGKFSC

SEQ ID NO: 99 - protein, 52 aa, Homo sapiens
CVGQNHSEDGAPALLTTAPPPGLQPGAGGTPGGPGGGGAPPRYATLEHPFHC

SEQ ID NO: 100 - protein, 33 aa, Homo sapiens
CDEPYPRLVDLNLAGEPTEGAPVAVQRDYGFWC

SEQ ID NO: 101 - protein, 24 aa, Homo sapiens
CMEGPGDEEVPLPHKTPIQPGEEC

SEQ ID NO: 102 - protein, 36 aa, Homo sapiens
CMDYNRSEATTAPPRPFPAKPTLPGPPGAPASGGEC

SEQ ID NO: 103 - protein, 33 aa, Homo sapiens
CDETVPVTFDPHTEFLGPQKKTEQVQRDIGFWC

SEQ ID NO: 104 - protein, 49 aa, Homo sapiens
CVGQNTSDGSGGAGGSPTAYPTAPYLPDPPFTAMSPSDGRGRLSFPFSC

SEQ ID NO: 105 - protein, 81 aa, Homo sapiens
CMDYNRTDLTTAAPSPPRRLPPPPPGEQPPSGSGHGRPPGARPPHRGGGRGGGGGDAAAPPARGGGGGGKARPPGGGAAPC

SEQ ID NO: 106 - protein, 45 aa, Homo sapiens
CMEAPENATAGPAEPHKGLGMLPVAPRPARPPGDLGPGAGGSGTC

SEQ ID NO: 107 - protein, 46 aa, Homo sapiens
CMEAPNNGSDEPTRGSGLFPPLFRPQRPHSAQEHPLKDGGPGRGGC

SEQ ID NO: 108 - protein, 31 aa, Homo sapiens
QAAGQGPGQGPGPGQQPPPPPQQQQSGQQYN

SEQ ID NO: 109 - protein, 360 aa, Artificial Sequence
  Made in Lab - Wnt surrogate molecule sequence
MDMRVPAQLLGLLLLWLRGARCDVQLVESGGGLVQPGGSLRLSCTSSANINSIETLGWYRQAPGKQRELIANMRGGGYMKYAGSLKGRFTMSTESAKNTMYLQMNSLKPEDTAVYYCYVKLRDDDYVYRGQGTQVTVSSGSGSGQAVVLQEPSLSVSPGGTVTLTCGLSSGSVSTNYYPSWYQQTPGQAPRTLIYYTNTRSSDVPERFSGSIVGNKAALTITGAQPDDESVYFCLLYLGRGIWVFGGGTKLTVLGQPKAAPSVTLFPPSSEELQANKATLVCLISDFYPGAVTVAWKADSSPVKAGVETTTPSKQSNNKYAASSYLSLTPEQWKSHRSYSCQVTHEGSTVEKTVAPTECS

SEQ ID NO: 110 - protein, 474 aa, Artificial Sequence
  Made in Lab - Wnt surrogate molecule sequence
MDMRVPAQLLGLLLLWLRGARCEVQLVQSGAEVKKPGASVKVSCKASGYTFTSYGISWVRQAPGQGLEWMGWISAYNGNTNYAQKLQGRVTMTTDTSTSTAYMELRSLRSDDTAVYYCASSKEKATYYYGMDVWGQGTTVTVSSASTKGPSVFPLAPSSKSTSGGTAALGCLVKDYFPEPVTVSWNSGALTSGVHTFPAVLQSSGLYSLSSVVTVPSSSLGTQTYICNVNHKPSNTKVDKKVEPKSCDKTHTCPPCPAPEAAGGPSVFLFPPKPKDTLMISRTPEVTCVVVDVSHEDPEVKFNWYVDGVEVHNAKTKPREEQYNSTYRVVSVLTVLHQDWLNGKEYKCKVSNKALGAPIEKTISKAKGQPREPQVYTLPPSREEMTKNQVSLTCLVKGFYPSDIAVEWESNGQPENNYKTTPPVLDSDGSFFLYSKLTVDKSRWQQGNVFSCSVMHEALHNHYTQKSLSLSPGK

SEQ ID NO: 111 - protein, 363 aa, Artificial Sequence
  Made in Lab - Wnt surrogate molecule sequence
MDMRVPAQLLGLLLLWLRGARCDVQLVESGGGLVQPGGSLRLSCTSSANINSIETLGWYRQAPGKQRELIANMRGGGYMKYAGSLKGRFTMSTESAKNTMYLQMNSLKPEDTAVYYCYVKLRDDDYVYRGQGTQVTVSSGSGSGDVVMSQSPSSLAVSVGEKVTMSCKSSQSLLYSSNQKNYLAWYQQKPGQSPKLLIYWASTRESGVPDRFTGSGSGTDFTLTISSVKAKDLAVYYCQQYYSYPTFGGGTKLEIKRTVAAPSVFIFPPSDEQLKSGTASVVCLLNNFYPREAKVQWKVDNALQSGNSQESVTEQDSKDSTYSLSSTLTLSKADYEKHKVYACEVTHQGLSSPVTKSFNRGEC

SEQ ID NO: 112 - protein, 471 aa, Artificial Sequence
  Made in Lab - Wnt surrogate molecule sequence
MDMRVPAQLLGLLLLWLRGARCEVQLVESGGGLVKPGGSLKLSCAASGFTFSSYAMSWVRQTPEKRLEWVATISDGGSYTRYPDKLKGRFTISRDNAKNNLYLQMSHLKSEDTAMYYCARVGGRRDYFDYWGQGTTLTVSSASTKGPSVFPLAPSSKSTSGGTAALGCLVKDYFPEPVTVSWNSGALTSGVHTFPAVLQSSGLYSLSSVVTVPSSSLGTQTYICNVNHKPSNTKVDKKVEPKSCDKTHTCPPCPAPEAAGGPSVFLFPPKPKDTLMISRTPEVTCVVVDVSHEDPEVKFNWYVDGVEVHNAKTKPREEQYNSTYRVVSVLTVLHQDWLNGKEYKCKVSNKALGAPIEKTISKAKGQPREPQVYTLPPSREEMTKNQVSLTCLVKGFYPSDIAVEWESNGQPENNYKTTPPVLDSDGSFFLYSKLTVDKSRWQQGNVFSCSVMHEALHNHYTQKSLSLSPGK

SEQ ID NO: 113 - protein, 357 aa, Artificial Sequence
  Made in Lab - Wnt surrogate molecule sequence
MDMRVPAQLLGLLLLWLRGARCDVQLVESGGGLVQPGGSLRLSCTSSANINSIETLGWYRQAPGKQRELIANMRGGGYMKYAGSLKGRFTMSTESAKNTMYLQMNSLKPEDTAVYYCYVKLRDDDYVYRGQGTQVTVSSGSGSGDIVMTQSPKSMSMSVGERVTLRCKASENVLNYVSWYQQKPEQSPKLLIYGASNRYTGVPDRFTGSGSATDFTLTISSVQAEDLADYHCGQSYRYPTFGAGTKLELKRTVAAPSVFIFPPSDEQLKSGTASVVCLLNNFYPREAKVQWKVDNALQSGNSQESVTEQDSKDSTYSLSSTLTLSKADYEKHKVYACEVTHQGLSSPVTKSFNRGEC

SEQ ID NO: 114 - protein, 472 aa, Artificial Sequence
  Made in Lab - Wnt surrogate molecule sequence
MDMRVPAQLLGLLLLWLRGARCEVQPVESGGGLVQPKGSLKLSCAASGFTFNTYAMHWVRQAPGKGLEWVARIRSKSNNYAKNYDDSVKDRFTISRDDSQSMLYLQMNNLKTEDTAMYYCVRENYGGRFDYWGQGTTLTVSSASTKGPSVFPLAPSSKSTSGGTAALGCLVKDYFPEPVTVSWNSGALTSGVHTFPAVLQSSGLYSLSSVVTVPSSSLGTQTYICNVNHKPSNTKVDKKVEPKSCDKTHTCPPCPAPEAAGGPSVFLFPPKPKDTLMISRTPEVTCVVVDVSHEDPEVKFNWYVDGVEVHNAKTKPREEQYNSTYRVVSVLTVLHQDWLNGKEYKCKVSNKALGAPIEKTISKAKGQPREPQVYTLPPSREEMTKNQVSLTCLVKGFYPSDIAVEWESNGQPENNYKTTPPVLDSDGSFFLYSKLTVDKSRWQQGNVFSCSVMHEALHNHYTQKSLSLSPGK

SEQ ID NO: 115 - protein, 358 aa, Artificial Sequence
  Made in Lab - Wnt surrogate molecule sequence
MDMRVPAQLLGLLLLWLRGARCDVQLVESGGGLVQPGGSLRLSCTSSANINSIETLGWYRQAPGKQRELIANMRGGGYMKYAGSLKGRFTMSTESAKNTMYLQMNSLKPEDTAVYYCYVKLRDDDYVYRGQGTQVTVSSGSGSGDIQMTQSPSSLSASVGDRVTITCRASQSISSYLNWYQQKPGKAPKLLIYAASSLQSGVPSRFSGSGSGTDFTLTISSLQPEDFATYYCQQSYSTPLTFGGGTKVEIKRTVAAPSVFIFPPSDEQLKSGTASVVCLLNNFYPREAKVQWKVDNALQSGNSQESVTEQDSKDSTYSLSSTLTLSKADYEKHKVYACEVTHQGLSSPVTKSFNRGEC

SEQ ID NO: 116 - protein, 472 aa, Artificial Sequence
  Made in Lab - Wnt surrogate molecule sequence
MDMRVPAQLLGLLLLWLRGARCEVQLVESGGGLVKPGGSLRLSCAASGFTFTNYAMSWVRQAPGKGLEWVSAISGSGGSTYYADSVKGRFTISRDDSKNTLYLQMNSLKTEDTAVYYCARATGFGTVVFDYWGQGTLVTVSSASTKGPSVFPLAPSSKSTSGGTAALGCLVKDYFPEPVTVSWNSGALTSGVHTFPAVLQSSGLYSLSSVVTVPSSSLGTQTYICNVNHKPSNTKVDKKVEPKSCDKTHTCPPCPAPEAAGGPSVFLFPPKPKDTLMISRTPEVTCVVVDVSHEDPEVKFNWYVDGVEVHNAKTKPREEQYNSTYRVVSVLTVLHQDWLNGKEYKCKVSNKALGAPIEKTISKAKGQPREPQVYTLPPSREEMTKNQVSLTCLVKGFYPSDIAVEWESNGQPENNYKTTPPVLDSDGSFFLYSKLTVDKSRWQQGNVFSCSVMHEALHNHYTQKSLSLSPGK

SEQ ID NO: 117 - protein, 358 aa, Artificial Sequence; identical to SEQ ID NO: 115
  Made in Lab - Wnt surrogate molecule sequence

SEQ ID NO: 118 - protein, 476 aa, Artificial Sequence
  Made in Lab - Wnt surrogate molecule sequence
MDMRVPAQLLGLLLLWLRGARCEVQLVQSGGGLVKPGGSLRLSCAASGFTFSSYSMNWVRQAPGKGLEWVSYIENDGSITTYADSVKGRFTISRDDSKNTLYLQMNSLKTEDTAVYYCARAPYYYGSGSLFRLDYWGQGTLVTVSSASTKGPSVFPLAPSSKSTSGGTAALGCLVKDYFPEPVTVSWNSGALTSGVHTFPAVLQSSGLYSLSSVVTVPSSSLGTQTYICNVNHKPSNTKVDKKVEPKSCDKTHTCPPCPAPEAAGGPSVFLFPPKPKDTLMISRTPEVTCVVVDVSHEDPEVKFNWYVDGVEVHNAKTKPREEQYNSTYRVVSVLTVLHQDWLNGKEYKCKVSNKALGAPIEKTISKAKGQPREPQVYTLPPSREEMTKNQVSLTCLVKGFYPSDIAVEWESNGQPENNYKTTPPVLDSDGSFFLYSKLTVDKSRWQQGNVFSCSVMHEALHNHYTQKSLSLSPGK

SEQ ID NO: 119 - protein, 358 aa, Artificial Sequence; identical to SEQ ID NO: 115
  Made in Lab - Wnt surrogate molecule sequence

SEQ ID NO: 120 - protein, 483 aa, Artificial Sequence
  Made in Lab - Wnt surrogate molecule sequence
MDMRVPAQLLGLLLLWLRGARCEVQLVESGGGLVKPGGSLRLSCAASGFTFTNYAMSWVRQAPGKGLEWVSAISGSGGSTYYADSVKGRFTISRDDSKNTLYLQMNSLKTEDTAVYYCARATGFGTVVFDYWGQGTLVTVSSASTKGPSVFPLAPSSKSTSGGTAALGCLVKDYFPEPVTVSWNSGALTSGVHTFPAVLQSSGLYSLSSVVTVPSSSLGTQTYICNVNHKPSNTKVDKKVEPKSCDKTHTCPPCPAPEAAGGPSVFLFPPKPKDTLMISRTPEVTCVVVDVSHEDPEVKFNWYVDGVEVHNAKTKPREEQYNSTYRVVSVLTVLHQDWLNGKEYKCKVSNKALGAPIEKTISKAKGQPREPQVYTLPPSREEMTKNQVSLSCAVKGFYPSDIAVEWESNGQPENNYKTTPPVLDSDGSFFLVSKLTVDKSRWQQGNVFSCSVMHEALHNHYTQKSLSLSPGKGSGSGHHHHHH

SEQ ID NO: 121 - protein, 358 aa, Artificial Sequence; identical to SEQ ID NO: 115
  Made in Lab - Wnt surrogate molecule sequence

SEQ ID NO: 122 - protein, 489 aa, Artificial Sequence
  Made in Lab - Wnt surrogate molecule sequence
MDMRVPAQLLGLLLLWLRGARCEVQLVQSGGGLVKPGGSLRLSCAASGFTFSSYSMNWVRQAPGKGLEWVSYIENDGSITTYADSVKGRFTISRDDSKNTLYLQMNSLKTEDTAVYYCARAPYYYGSGSLFRLDYWGQGTLVTVSSASTKGPSVFPLAPSSKSTSGGTAALGCLVKDYFPEPVTVSWNSGALTSGVHTFPAVLQSSGLYSLSSVVTVPSSSLGTQTYICNVNHKPSNTKVDKKVEPKSCDKTHTCPPCPAPEAAGGPSVFLFPPKPKDTLMISRTPEVTCVVVDVSHEDPEVKFNWYVDGVEVHNAKTKPREEQYNSTYRVVSVLTVLHQDWLNGKEYKCKVSNKALGAPIEKTISKAKGQPREPQVYTLPPSREEMTKNQVSLWCLVKGFYPSDIAVEWESNGQPENNYKTTPPVLDSDGSFFLYSKLTVDKSRWQQGNVFSCSVMHEALHNHYTQKSLSLSPGKGGSGGDYKDDDDK

SEQ ID NO: 123 - protein, 264 aa, Artificial Sequence
  Made in Lab - Wnt surrogate molecule sequence
MDMRVPAQLLGLLLLWLRGARCEFDKTHTCPPCPAPEAAGGPSVFLFPPKPKDTLMISRTPEVTCVVVDVSHEDPEVKFNWYVDGVEVHNAKTKPREEQYNSTYRVVSVLTVLHQDWLNGKEYKCKVSNKALGAPIEKTISKAKGQPREPQVYTLPPSREEMTKNQVSLWCLVKGFYPSDIAVEWESNGQPENNYKTTPPVLDSDGSFFLYSKLTVDKSRWQQGNVFSCSVMHEALHNHYTQKSLSLSPGKGGSGGDYKDDDDK

SEQ ID NO: 124 - protein, 262 aa, Artificial Sequence
  Made in Lab - Wnt surrogate molecule sequence
MDMRVPAQLLGLLLLWLRGARCEFDKTHTCPPCPAPEAAGGPSVFLFPPKPKDTLMISRTPEVTCVVVDVSHEDPEVKFNWYVDGVEVHNAKTKPREEQYNSTYRVVSVLTVLHQDWLNGKEYKCKVSNKALGAPIEKTISKAKGQPREPQVYTLPPSREEMTKNQVSLSCAVKGFYPSDIAVEWESNGQPENNYKTTPPVLDSDGSFFLVSKLTVDKSRWQQGNVFSCSVMHEALHNHYTQKSLSLSPGKGSGSGHHHHHH

SEQ ID NO: 125 - protein, 358 aa, Artificial Sequence
  Made in Lab - synthesized Wnt surrogate molecule
MDMRVPAQLLGLLLLWLRGARCDVQLVESGGGLVQPGGSLRLSCTSSANINSIETLGWYRQAPGKQRELIANMRGGGYMKYAGSLKGRFTMSTESAKNTMYLQMNSLKPEDTAVYYCYVKLRDDDYVYRGQGTQVTVSSGGSGSDIQMTQSPSSLSASVGDRVTITCRASQSISSYLNWYQQKPGKAPKLLIYAASSLQSGVPSRFSGSGSGTDFTLTISSLQPEDFATYYCQQSYSTPLTFGGGTKVEIKRTVAAPSVFIFPPSDEQLKSGTASVVCLLNNFYPREAKVQWKVDNALQSGNSQESVTEQDSKDSTYSLSSTLTLSKADYEKHKVYACEVTHQGLSSPVTKSFNRGEC

SEQ ID NO: 126 - protein, 472 aa, Artificial Sequence
  Made in Lab - synthesized Wnt surrogate molecule
MDMRVPAQLLGLLLLWLRGARCQVQLVQSGAEVKKPGASVKVSCKASGYIFTDYYMHWVRQAPGQGLEWMGLVDPEDGETIYAEKFQGRVTMTRDTSTSTVYMELSSLRSEDTAVYYCAHSDFFSGLSFGDWGQGTLVTVSSASTKGPSVFPLAPSSKSTSGGTAALGCLVKDYFPEPVTVSWNSGALTSGVHTFPAVLQSSGLYSLSSVVTVPSSSLGTQTYICNVNHKPSNTKVDKKVEPKSCDKTHTCPPCPAPEAAGGPSVFLFPPKPKDTLMISRTPEVTCVVVDVSHEDPEVKFNWYVDGVEVHNAKTKPREEQYNSTYRVVSVLTVLHQDWLNGKEYKCKVSNKALGAPIEKTISKAKGQPREPQVYTLPPSREEMTKNQVSLTCLVKGFYPSDIAVEWESNGQPENNYKTTPPVLDSDGSFFLYSKLTVDKSRWQQGNVFSCSVMHEALHNHYTQKSLSLSPGK

SEQ ID NO: 127 - protein, 358 aa, Artificial Sequence
  Made in Lab - synthesized Wnt surrogate molecule
MDMRVPAQLLGLLLLWLRGARCDVQLVESGGGLVQPGGSLRLSCTSSANINSIETLGWYRQAPGKQRELIANMRGGGYMKYAGSLKGRFTMSTESAKNTMYLQMNSLKPEDTAVYYCYVKLRDDDYVYRGQGTQVTVSSGGSGSDIQMTQSPSSLSASVGDRVTITCRASQSISSYLNWYQKKPGKKPKLLIYAASSLQSGVPSRFSGSGSGTDFTLTISSLQPEDFATYYCQQSYSTPLTFGGGTKVEIKRTVAAPSVFIFPPSDEQLKSGTASVVCLLNNFYPREAKVQWKVDNALQSGNSQESVTEQDSKDSTYSLESTLTLSKADYEKHKVYACEVTHQGLSSPVTKSFNRGEC

SEQ ID NO: 128 - protein, 483 aa, Artificial Sequence
  Made in Lab - synthesized Wnt surrogate molecule
MDMRVPAQLLGLLLLWLRGARCQVQLVQSGAEVKKPGASVKVSCKASGYIFTDYYMHWVRDAPGQGLEWMGLVDPEDGETIYAEKFQGRVTMTRDTSTSTVYMELSSLRSEDTAVYYCAHSDFFSGLSFGDWGDGTLVTVSSASTKGPSVFPLAPSSKSTSGGTAALGCLVKDYFPEPVTVSWNSGALTSGVHTFPAVLQSSGLYSLKSVVTVPSSSLGTQTYICNVNHKPSNTKVDKKVEPKSCDKTHTCPPCPAPEAAGGPSVFLFPPKPKDTLMISRTPEVTCVVVDVSHEDPEVKFNWYVDGVEVHNAKTKPREEQYNSTYRVVSVLTVLHQDWLNGKEYKCKVSNKALGAPIEKTISKAKGQPREPQVYTLPPSREEMTKNQVSLSCAVKGFYPSDIAVEWESNGQPENNYKTTPPVLDSDGSFFLVSKLTVDKSRWQQGNVFSCSVMHEALHNHYTQKSLSLSPGKGSGSGHHHHHH

SEQ ID NO: 129 - protein, 357 aa, Artificial Sequence
  Made in Lab - synthesized Wnt surrogate molecule
MDMRVPAQLLGLLLLWLRGARCDVQLVESGGGLVQPGGSLRLSCTSSANINSIETLGWYRQAPGKQRELIANMRGGGYMKYAGSLKGRFTMSTESAKNTMYLQMNSLKPEDTAVYYCYVKLRDDDYVYRGQGTQVTVSSGSGSGSYVLTQPPSVSVSPGQTASITCSGDKVGHKYASWYQDKPGQDPVLVIYEDSQRPSGIPVRFSGSNSGNTATLTISGTQAMDEADYYCQAWDSSTDVVFGGGTKLTVLGQPKAAPSVTLFPPSSEELQANKATLVCLISDFYPGAVTVAWKADSSPVKAGVETTTPSKQSNNKYAAKSYLSLTPEQWKSHRSYSCQVTHEGSTVEKTVAPTECS

SEQ ID NO: 130 - protein, 489 aa, Artificial Sequence
  Made in Lab - synthesized Wnt surrogate molecule
MDMRVPAQLLGLLLLWLRGARCQVQLQQWGAGLLKPSETLSLTCAVSGASFSGHYWTWIRKPPGKGLEWIGEIDHTGSTNYEPSLRSRVTISVDTSKNQFSLNLKSVTAADTAVYYCARGGQGGYDWGHYHGLDVWGKGTTVTVSSASTKGPSVFPLAPSSKSTSGGTAALGCLVKDYFPEPVTVSWNSGALTSGVHTFPAVLQSSGLYSLESVVTVPSSSLGTQTYICNVNHKPSNTKVDKKVEPKSCDKTHTCPPCPAPEAAGGPSVFLFPPKPKDTLMISRTPEVTCVVVDVSHEDPEVKFNWYVDGVEVHNAKTKPREEQYNSTYRVVSVLTVLHQDWLNGKEYKCKVSNKALGAPIEKTISKAKGQPREPQVYTLPPSREEMTKNQVSLWCLVKGFYPSDIAVEWESNGQPENNYKTTPPVLDSDGSFFLYSKLTVDKSRWQQGNVFSCSVMHEALHNHYTQKSLSLSPGKGGSGGDYKDDDDK

SEQ ID NO: 131 - protein, 262 aa, Artificial Sequence; identical to SEQ ID NO: 124
  Made in Lab - synthesized Wnt surrogate molecule

SEQ ID NO: 132 - protein, 362 aa, Artificial Sequence
  Made in Lab - synthesized Wnt surrogate molecule
MDMRVPAQLLGLLLLWLRGARCDVQLVESGGGLVQAGGSLRLACAGSGRIFAIYDIAWYRHPPGNQRELVAMIRPVVTEIDYADSVKGRFTISRNNAMKTVYLQMNNLKPEDTAVYYCNAKRPWGSRDEYWGQGTQVTVSSGSGSGQAVVLQEPSLSVSPGGTVTLTCGLSSGSVSTNYYPSWYQQTPGQAPRTLIYYTNTRSSDVPERFSGSIVGNKAALTITGAQPDDESVYFCLLYLGRGIWVFGGGTKLTVLGQPKAAPSVTLFPPSSEELQANKATLVCLISDFYPGAVTVAWKADSSPVKAGVETTTPSKQSNNKYAASSYLSLTPEQWKSHRSYSCQVTHEGSTVEKTVAPTECS

SEQ ID NO: 133 - protein, 485 aa, Artificial Sequence
  Made in Lab - synthesized Wnt surrogate molecule
MDMRVPAQLLGLLLLWLRGARCEVQLVQSGAEVKKPGASVKVSCKASGYTFTSYGISWVRQAPGQGLEWMGWISAYNGNTNYAQKLQGRVTMTTDTSTSTAYMELRSLRSDDTAVYYCASSKEKATYYAGMDVWGQGTTVTVSSASTKGPSVFPLAPSSKSTSGGTAALGCLVKDYFPEPVTVSWNSGALTSGVHTFPAVLQSSGLYSLSSVVTVPSSSLGTQTYICNVNHKPSNTKVDKKVEPKSCDKTHTCPPCPAPEAAGGPSVFLFPPKPKDTLMISRTPEVTCVVVDVSHEDPEVKFNWYVDGVEVHNAKTKPREEQYNSTYRVVSVLTVLHQDWLNGKEYKCKVSNKALGAPIEKTISKAKGQPREPQVYTLPPSREEMTKNQVSLTCLVKGFYPSDIAVEWESNGQPENNYKTTPPVLDSDGSFFLYSKLTVDKSRWQQGNVFSCSVMHEALHNHYTQKSLSLSPGKGSGSGHHHHHH

SEQ ID NO: 134 - protein, 357 aa, Artificial Sequence
  Made in Lab - synthesized Wnt surrogate molecule
MDMRVPAQLLGLLLLWLRGARCDVQLVESGGGLVQPGGSLRLSCTSSANINSIETLGWYRQAPGKQRELIANMRGGGYMKYAGSLKGRFTMSTESAKNTMYLQMNSLKPEDTAVYYCYVKLRDDDYVYRGQGTQVTVSSGSGSGSYVLTQPPSVSVSPGQTASITCSGDKVGHKYASWYQQKPGQSPVLVIYEDSQRPSGIPVRFSGSNSGNTATLTISGTQAMDEADYYCQAWDSSTDVVFGGGTKLTVLGQPKAAPSVTLFPPSSEELQANKATLVCLISDFYPGAVTVAWKADSSPVKAGVETTTPSKQSNNKYAASSYLSLTPEQWKSHRSYSCQVTHEGSTVEKTVAPTECS

SEQ ID NO: 135 - protein, 476 aa, Artificial Sequence
  Made in Lab - synthesized Wnt surrogate molecule
MDMRVPAQLLGLLLLWLRGARCQVQLQQWGAGLLKPSETLSLTCAVSGASFSGHYWTWIRQPPGKGLEWIGEIDHTGSTNYEPSLRSRVTISVDTSKNQFSLNLKSVTAADTAVYYCARGGQGGYDWGHYHGLDVWGQGTTVTVSSASTKGPSVFPLAPSSKSTSGGTAALGCLVKDYFPEPVTVSWNSGALTSGVHTFPAVLQSSGLYSLSSVVTVPSSSLGTQTYICNVNHKPSNTKVDKKVEPKSCDKTHTCPPCPAPEAAGGPSVFLFPPKPKDTLMISRTPEVTCVVVDVSHEDPEVKFNWYVDGVEVHNAKTKPREEQYNSTYRVVSVLTVLHQDWLNGKEYKCKVSNKALGAPIEKTISKAKGQPREPQVYTLPPSREEMTKNQVSLTCLVKGFYPSDIAVEWESNGQPENNYKTTPPVLDSDGSFFLYSKLTVDKSRWQQGNVFSCSVMHEALHNHYTQKSLSLSPGK

SEQ ID NO: 136 - protein, 235 aa, Artificial Sequence
  Made in Lab - synthesized Wnt surrogate molecule
MDMRVPAQLLGLLLLWLRGARCSYVLTQPPSVSVSPGQTASITCSGDKVGHKYASWYQKKPGQKPVLVIYEDSQRPSGIPVRFSGSNSGNTATLTISGTQAMDEADYYCQAWDSSTDVVFGGGTKLTVLGQPKAAPSVTLFPPSSEELQANKATLVCLISDFYPGAVTVAWKADSSPVKAGVETTTPSKQSNNKYAAESYLSLTPEQWKSHRSYSCQVTHEGSTVEKTVAPTECS

SEQ ID NO: 137 - protein, 487 aa, Artificial Sequence
  Made in Lab - synthesized Wnt surrogate molecule
MDMRVPAQLLGLLLLWLRGARCQVQLQQWGAGLLKPSETLSLTCAVSGASFSGHYWTWIRDPPGKGLEWIGEIDHTGSTNYEPSLRSRVTISVDTSKNQFSLNLKSVTAADTAVYYCARGGQGGYDWGHYHGLDVWGDGTTVTVSSASTKGPSVFPLAPSSKSTSGGTAALGCLVKDYFPEPVTVSWNSGALTSGVHTFPAVLQSSGLYSLKSVVTVPSSSLGTQTYICNVNHKPSNTKVDKKVEPKSCDKTHTCPPCPAPEAAGGPSVFLFPPKPKDTLMISRTPEVTCVVVDVSHEDPEVKFNWYVDGVEVHNAKTKPREEQYNSTYRVVSVLTVLHQDWLNGKEYKCKVSNKALGAPIEKTISKAKGQPREPQVYTLPPSREEMTKNQVSLSCAVKGFYPSDIAVEWESNGQPENNYKTTPPVLDSDGSFFLVSKLTVDKSRWQQGNVFSCSVMHEALHNHYTQKSLSLSPGKGSGSGHHHHHH

SEQ ID NO: 138 - protein, 611 aa, Artificial Sequence
  Made in Lab - synthesized Wnt surrogate molecule
MDMRVPAQLLGLLLLWLRGARCDVQLVESGGGLVQAGGSLRLACAGSGRIFAIYDIAWYRHPPGNQRELVAMIRPVVTEIDYADSVKGRFTISRNNAMKTVYLQMNNLKPEDTAVYYCNAKRPWGSRDEYWGQGTQVTVSSGSGSGEVQLVQSGAEVKKPGASVKVSCKASGYTFTSYGISWVRQAPGQGLEWMGWISAYNGNTNYAQKLQGRVTMTTDTSTSTAYMELRSLRSDDTAVYYCASSKEKATYYYGMDVWGQGTTVTVSSASTKGPSVFPLAPSSKSTSGGTAALGCLVKDYFPEPVTVSWNSGALTSGVHTFPAVLQSSGLYSLSSVVTVPSSSLGTQTYICNVNHKPSNTKVDKKVEPKSCDKTHTCPPCPAPEAAGGPSVFLFPPKPKDTLMISRTPEVTCVVVDVSHEDPEVKFNWYVDGVEVHNAKTKPREEQYNSTYRVVSVLTVLHQDWLNGKEYKCKVSNKALGAPIEKTISKAKGQPREPQVYTLPPSREEMTKNQVSLWCLVKGFYPSDIAVEWESNGQPENNYKTTPPVLDSDGSFFLYSKLTVDKSRWQQGNVFSCSVMHEALHNHYTQKSLSLSPGKGGSGGDYKDDDDK

SEQ ID NO: 139 - protein, 486 aa, Artificial Sequence
  Made in Lab - synthesized Wnt surrogate molecule
MDMRVPAQLLGLLLLWLRGARCDVQLVESGGGLVQAGGSLRLACAGSGRIFAIYDIAWYRHPPGNQRELVAMIRPVVTEIDYADSVKGRFTISRNNAMKTVYLQMNNLKPEDTAVYYCNAKRPWGSRDEYWGQGTQVTVSSGSGSGQAVVLQEPSLSVSPGGTVTLTCGLSSGSVSTNYYPSWYQQTPGQAPRTLIYYTNTRSSDVPERFSGSIVGNKAALTITGAQPDDESVYFCLLYLGRGIWVFGGGTKLTVLGQPKAAPSVTLFPPSSEELQANKATLVCLISDFYPGAVTVAWKADSSPVKAGVETTTPSKQSNNKYAASSYLSLTPEQWKSHRSYSCQVTHEGSTVEKTVAPTECSGSGSGDVQLVESGGGLVQAGGSLRLACAGSGRIFAIYDIAWYRHPPGNQRELVAMIRPVVTEIDYADSVKGRFTISRNNAMKTVYLQMNNLKPEDTAVYYCNAKRPWGSRDEYWGQGTQVTVSS

SEQ ID NO: 140 - protein, 258 aa, Artificial Sequence
  Made in Lab - synthesized Wnt surrogate molecule
MDMRVPAQLLGLLLLWLRGARCEVQLVQSGAEVKKPGASVKVSCKASGYTFTSYGISWVRQAPGQGLEWMGWISAYNGNTNYAQKLQGRVTMTTDTSTSTAYMELRSLRSDDTAVYYCASSKEKATYYYGMDVWGQGTTVTVSSASTKGPSVFPLAPSSKSTSGGTAALGCLVKDYFPEPVTVSWNSGALTSGVHTFPAVLQSSGLYSLSSVVTVPSSSLGTQTYICNVNHKPSNTKVDKKVEPKSCGSGSGHHHHHH

SEQ ID NO: 141 - protein, 598 aa, Artificial Sequence
  Made in Lab - synthesized Wnt surrogate molecule
MDMRVPAQLLGLLLLWLRGARCEVQLVQSGAEVKKPGASVKVSCKASGYTFTSYGISWVRQAPGQGLEWMGWISAYNGNTNYAQKLQGRVTMTTDTSTSTAYMELRSLRSDDTAVYYCASSKEKATYYYGMDVWGQGTTVTVSSASTKGPSVFPLAPSSKSTSGGTAALGCLVKDYFPEPVTVSWNSGALTSGVHTFPAVLQSSGLYSLSSVVTVPSSSLGTQTYICNVNHKPSNTKVDKKVEPKSCDKTHTCPPCPAPEAAGGPSVFLFPPKPKDTLMISRTPEVTCVVVDVSHEDPEVKFNWYVDGVEVHNAKTKPREEQYNSTYRVVSVLTVLHQDWLNGKEYKCKVSNKALGAPIEKTISKAKGQPREPQVYTLPPSREEMTKNQVSLWCLVKGFYPSDIAVEWESNGQPENNYKTTPPVLDSDGSFFLYSKLTVDKSRWQQGNVFSCSVMHEALHNHYTQKSLSLSPGKGSGSGDVQLVESGGGLVQAGGSLRLACAGSGRIFAIYDIAWYRHPPGNQRELVAMIRPVVTEIDYADSVKGRFTISRNNAMKTVYLQMNNLKPEDTAVYYCNAKRPWGSRDEYWGQGTQVTVSS

SEQ ID NO: 142 - protein, 238 aa, Artificial Sequence
  Made in Lab - synthesized Wnt surrogate molecule
MDMRVPAQLLGLLLLWLRGARCQAVVLQEPSLSVSPGGTVTLTCGLSSGSVSTNYYPSWYQKTPGQKPRTLIYYTNTRSSDVPERFSGSIVGNKAALTITGAQPDDESVYFCLLYLGRGIWVFGGGTKLTVLGQPKAAPSVTLFPPSSEELQANKATLVCLISDFYPGAVTVAWKADSSPVKAGVETTTPSKQSNNKYAAESYLSLTPEQWKSHRSYSCQVTHEGSTVEKTVAPTECS

SEQ ID NO: 143 - protein, 485 aa, Artificial Sequence
  Made in Lab - synthesized Wnt surrogate molecule
MDMRVPAQLLGLLLLWLRGARCEVQLVQSGAEVKKPGASVKVSCKASGYTFTSYGISWVRDAPGQGLEWMGWISAYNGNTNYAQKLQGRVTMTTDTSTSTAYMELRSLRSDDTAVYYCASSKEKATYYYGMDVWGDGTTVTVSSASTKGPSVFPLAPSSKSTSGGTAALGCLVKDYFPEPVTVSWNSGALTSGVHTFPAVLQSSGLYSLKSVVTVPSSSLGTQTYICNVNHKPSNTKVDKKVEPKSCDKTHTCPPCPAPEAAGGPSVFLFPPKPKDTLMISRTPEVTCVVVDVSHEDPEVKFNWYVDGVEVHNAKTKPREEQYNSTYRVVSVLTVLHQDWLNGKEYKCKVSNKALGAPIEKTISKAKGQPREPQVYTLPPSREEMTKNQVSLSCAVKGFYPSDIAVEWESNGQPENNYKTTPPVLDSDGSFFLVSKLTVDKSRWQQGNVFSCSVMHEALHNHYTQKSLSLSPGKGSGSGHHHHHH

SEQ ID NO: 144 - protein, 236 aa, Artificial Sequence
  Made in Lab - synthesized Wnt surrogate molecule
MDMRVPAQLLGLLLLWLRGARCDIQMTQSPSSLSASVGDRVTITCRASQSISSYLNWYQKKPGKKPKLLIYAASSLQSGVPSRFSGSGSGTDFTLTISSLQPEDFATYYCQQSYSTPLTFGGGTKVEIKRTVAAPSVFIFPPSDEQLKSGTASVVCLLNNFYPREAKVQWKVDNALQSGNSQESVTEQDSKDSTYSLESTLTLSKADYEKHKVYACEVTHQGLSSPVTKSFNRGEC

SEQ ID NO: 145 - protein, 485 aa, Artificial Sequence
  Made in Lab - synthesized Wnt surrogate molecule
MDMRVPAQLLGLLLLWLRGARCEVQLLQSGAEVKKPGSSVKVSCKASGGTFTYRYLHWVRDAPGQGLEWMGGIIPIFGTGNYAQKFQGRVTITADESTSTAYMELSSLRSEDTAVYYCASSMVRVPYYYGMDVWGDGTLVTVSSASTKGPSVFPLAPSSKSTSGGTAALGCLVKDYFPEPVTVSWNSGALTSGVHTFPAVLQSSGLYSLKSVVTVPSSSLGTQTYICNVNHKPSNTKVDKKVEPKSCDKTHTCPPCPAPEAAGGPSVFLFPPKPKDTLMISRTPEVTCVVVDVSHEDPEVKFNWYVDGVEVHNAKTKPREEQYNSTYRVVSVLTVLHQDWLNGKEYKCKVSNKALGAPIEKTISKAKGQPREPQVYTLPPSREEMTKNQVSLSCAVKGFYPSDIAVEWESNGQPENNYKTTPPVLDSDGSFFLVSKLTVDKSRWQQGNVFSCSVMHEALHNHYTQKSLSLSPGKGSGSGHHHHHH

SEQ ID NO: 146 - protein, 236 aa, Artificial Sequence
  Made in Lab - synthesized Wnt surrogate molecule
MDMRVPAQLLGLLLLWLRGARCDIQMTQSPSSLSASVGDRVTITCRASQGISSALAWYQKKPGKKPKLLIYAASSLQSGVPSRFSGSGSGTDFTLTISSLQPEDFATYYCQQTYSMPITFGQGTRLEIKRTVAAPSVFIFPPSDEQLKSGTASVVCLLNNFYPREAKVQWKVDNALQSGNSQESVTEQDSKDSTYSLESTLTLSKADYEKHKVYACEVTHQGLSSPVTKSFNRGEC

SEQ ID NO: 147 - protein, 483 aa, Artificial Sequence
  Made in Lab - synthesized Wnt surrogate molecule
MDMRVPAQLLGLLLLWLRGARCQVQLVQSGAEVKKPGASVKVSCKASGYTFTSYYMHWVRDAPGQGLEWMGRINPNSGGTNYAQKFQGRVTMTRDTSTSTVYMELSSLRSEDTAVYYCARVPDFWSGYLDYWGDGTLVTVSSASTKGPSVFPLAPSSKSTSGGTAALGCLVKDYFPEPVTVSWNSGALTSGVHTFPAVLQSSGLYSLKSVVTVPSSSLGTQTYICNVNHKPSNTKVDKKVEPKSCDKTHTCPPCPAPEAAGGPSVFLFPPKPKDTLMISRTPEVTCVVVDVSHEDPEVKFNWYVDGVEVHNAKTKPREEQYNSTYRVVSVLTVLHQDWLNGKEYKCKVSNKALGAPIEKTISKAKGQPREPQVYTLPPSREEMTKNQVSLSCAVKGFYPSDIAVEWESNGQPENNYKTTPPVLDSDGSFFLVSKLTVDKSRWQQGNVFSCSVMHEALHNHYTQKSLSLSPGKGSGSGHHHHHH

SEQ ID NO: 148 - protein, 359 aa, Artificial Sequence
  Made in Lab - synthesized Wnt surrogate molecule
MDMRVPAQLLGLLLLWLRGARCDVQLVESGGGLVQAGGSLRLACAGSGRIFAIYDIAWYRHPPGNQRELVAMIRPVVTEIDYADSVKGRFTISRNNAMKTVYLQMNNLKPEDTAVYYCNAKRPWGSRDEYWGQGTQVTVSSGGSGSSYVLTQPPSVSVSPGQTASITCSGDKVGHKYASWYQKKPGQKPVLVIYEDSQRPSGIPVRFSGSNSGNTATLTISGTQAMDEADYYCQAWDSSTDVVFGGGTKLTVLGQPKAAPSVTLFPPSSEELQANKATLVCLISDFYPGAVTVAWKADSSPVKAGVETTTPSKQSNNKYAAESYLSLTPEQWKSHRSYSCQVTHEGSTVEKTVAPTECS

SEQ ID NO: 149 - protein, 235 aa, Artificial Sequence
  Made in Lab - synthesized Wnt surrogate molecule
MDMRVPAQLLGLLLLWLRGARCSYVLTQPPSVSVSPGQTASITCSGDKVGHKYASWYQQKPGQSPVLVIYEDSQRPSGIPVRFSGSNSGNTATLTISGTQAMDEADYYCQAWDSSTDVVFGGGTKLTVLGQPKAAPSVTLFPPSSEELQANKATLVCLISDFYPGAVTVAWKADSSPVKAGVETTTPSKQSNNKYAASSYLSLTPEQWKSHRSYSCQVTHEGSTVEKTVAPTECS

SEQ ID NO: 150 - protein, 613 aa, Artificial Sequence
  Made in Lab - synthesized Wnt surrogate molecule
MDMRVPAQLLGLLLLWLRGARCDVQLVESGGGLVQAGGSLRLACAGSGRIFAIYDIAWYRHPPGNQRELVAMIRPVVTEIDYADSVKGRFTISRNNAMKTVYLQMNNLKPEDTAVYYCNAKRPWGSRDEYWGQGTQVTVSSGGSGSQVQLQQWGAGLLKPSETLSLTCAVSGASFSGHYWTWIRQPPGKGLEWIGEIDHTGSTNYEPSLRSRVTISVDTSKNQFSLNLKSVTAADTAVYYCARGGQGGYDWGHYHGLDVWGQGTTVTVSSASTKGPSVFPLAPSSKSTSGGTAALGCLVKDYFPEPVTVSWNSGALTSGVHTFPAVLQSSGLYSLSSVVTVPSSSLGTQTYICNVNHKPSNTKVDKKVEPKSCDKTHTCPPCPAPEAAGGPSVFLFPPKPKDTLMISRTPEVTCVVVDVSHEDPEVKFNWYVDGVEVHNAKTKPREEQYNSTYRVVSVLTVLHQDWLNGKEYKCKVSNKALGAPIEKTISKAKGQPREPQVYTLPPSREEMTKNQVSLWCLVKGFYPSDIAVEWESNGQPENNYKTTPPVLDSDGSFFLYSKLTVDKSRWQQGNVFSCSVMHEALHNHYTQKSLSLSPGKGGSGGDYKDDDDK

SEQ ID NO: 151 - protein, 609 aa, Artificial Sequence
  Made in Lab - synthesized Wnt surrogate molecule
MDMRVPAQLLGLLLLWLRGARCDVQLVESGGGLVQPGGSLRLSCTSSANINSIETLGWYRQAPGKQRELIANMRGGGYMKYAGSLKGRFTMSTESAKNTMYLQMNSLKPEDTAVYYCYVKLRDDDYVYRGQGTQVTVSSGGSGSQVQLQQWGAGLLKPSETLSLTCAVSGASFSGHYWTWIRQPPGKGLEWIGEIDHTGSTNYEPSLRSRVTISVDTSKNQFSLNLKSVTAADTAVYYCARGGQGGYDWGHYHGLDVWGQGTTVTVSSASTKGPSVFPLAPSSKSTSGGTAALGCLVKDYFPEPVTVSWNSGALTSGVHTFPAVLQSSGLYSLSSVVTVPSSSLGTQTYICNVNHKPSNTKVDKKVEPKSCDKTHTCPPCPAPEAAGGPSVFLFPPKPKDTLMISRTPEVTCVVVDVSHEDPEVKFNWYVDGVEVHNAKTKPREEQYNSTYRVVSVLTVLHQDWLNGKEYKCKVSNKALGAPIEKTISKAKGQPREPQVYTLPPSREEMTKNQVSLSCAVKGFYPSDIAVEWESNGQPENNYKTTPPVLDSDGSFFLVSKLTVDKSRWQQGNVFSCSVMHEALHNHYTQKSLSLSPGKGSGSGHHHHHH

SEQ ID NO: 152 - protein, 359 aa, Artificial Sequence
  Made in Lab - synthesized Wnt surrogate molecule
MDMRVPAQLLGLLLLWLRGARCDVQLVESGGGLVQAGGSLRLACAGSGRIFAIYDIAWYRHPPGNQRELVAMIRPVVTEIDYADSVKGRFTISRNNAMKTVYLQMNNLKPEDTAVYYCNAKRPWGSRDEYWGQGTQVTVSSGGSGSSYVLTQPPSVSVSPGQTASITCSGDKVGHKYASWYQDKPGQDPVLVIYEDSQRPSGIPVRFSGSNSGNTATLTISGTQAMDEADYYCQAWDSSTDVVFGGGTKLTVLGQPKAAPSVTLFPPSSEELQANKATLVCLISDFYPGAVTVAWKADSSPVKAGVETTTPSKQSNNKYAAKSYLSLTPEQWKSHRSYSCQVTHEGSTVEKTVAPTECS

SEQ ID NO: 153 - protein, 358 aa, Artificial Sequence
  Made in Lab - synthesized Wnt surrogate molecule
MDMRVPAQLLGLLLLWLRGARCDVQLVESGGGLVQPGGSLRLSCTSSANINSIETLGWYRQAPGKQRELIANMRGGGYMKYAGSLKGRFTMSTESAKNTMYLQMNSLKPEDTAVYYCYVKLRDDDYVYRGQGTQVTVSSGGSGSDIQMTQSPSSLSASVGDRVTITCRASQSISSYLNWYQKKPGKAPKLLIYAASSLQSGVPSRFSGSGSGTDFTLTISSLQPEDFATYYCQQSYSTPLTFGGGTKVEIKRTVAAPSVFIFPPSDEQLKSGTASVVCLLNNFYPREAKVQWKVDNALQSGNSQESVTEQDSKDSTYSLESTLTLSKADYEKHKVYACEVTHQGLSSPVTKSFNRGEC

SEQ ID NO: 154 - protein, 483 aa, Artificial Sequence
  Made in Lab - synthesized Wnt surrogate molecule
MDMRVPAQLLGLLLLWLRGARCEVQLVESGGGLVKPGGSLRLSCAASGFTFTNYAMSWVRDAPGKGLEWVSAISGSGGSTYYADSVKGRFTISRDDSKNTLYLQMNSLKTEDTAVYYCARATGFGTVVFDYWGDGTLVTVSSASTKGPSVFPLAPSSKSTSGGTAALGCLVKDYFPEPVTVSWNSGALTSGVHTFPAVLQSSGLYSLKSVVTVPSSSLGTQTYICNVNHKPSNTKVDKKVEPKSCDKTHTCPPCPAPEAAGGPSVFLFPPKPKDTLMISRTPEVTCVVVDVSHEDPEVKFNWYVDGVEVHNAKTKPREEQYNSTYRVVSVLTVLHQDWLNGKEYKCKVSNKALGAPIEKTISKAKGQPREPQVYTLPPSREEMTKNQVSLSCAVKGFYPSDIAVEWESNGQPENNYKTTPPVLDSDGSFFLVSKLTVDKSRWQQGNVFSCSVMHEALHNHYTQKSLSLSPGKGSGSGHHHHHH

SEQ ID NO: 155 - protein, 360 aa, Artificial Sequence
  Made in Lab - synthesized Wnt surrogate molecule
MDMRVPAQLLGLLLLWLRGARCDVQLVESGGGLVQAGGSLRLACAGSGRIFAIYDIAWYRHPPGNQRELVAMIRPVVTEIDYADSVKGRFTISRNNAMKTVYLQMNNLKPEDTAVYYCNAKRPWGSRDEYWGQGTQVTVSSGSGSGDIQMTQSPSSLSASVGDRVTITCRASQSISSYLNWYQDKPGKDPKLLIYAASSLQSGVPSRFSGSGSGTDFTLTISSLQPEDFATYYCQQSYRTPFTFGPGTKVDIKRTVAAPSVFIFPPSDEQLKSGTASVVCLLNNFYPREAKVQWKVDNALQSGNSQESVTEQDSKDSTYSLKSTLTLSKADYEKHKVYACEVTHQGLSSPVTKSFNRGEC

SEQ ID NO: 156 - protein, 494 aa, Artificial Sequence
  Made in Lab - synthesized Wnt surrogate molecule
MDMRVPAQLLGLLLLWLRGARCQVQLVQSGAEVKKPGSSVKVSCKASGYTFTNNFMHWVRKAPGQGLEWMGWINPNSGGTKYAQKFQGRVTITADESTSTAYMELSSLRSEDTAVYYCARSVGEVGATMLGIGVWYWFDPWGKGTLVTVSSASTKGPSVFPLAPSSKSTSGGTAALGCLVKDYFPEPVTVSWNSGALTSGVHTFPAVLQSSGLYSLESVVTVPSSSLGTQTYICNVNHKPSNTKVDKKVEPKSCDKTHTCPPCPAPEAAGGPSVFLFPPKPKDTLMISRTPEVTCVVVDVSHEDPEVKFNWYVDGVEVHNAKTKPREEQYNSTYRVVSVLTVLHQDWLNGKEYKCKVSNKALGAPIEKTISKAKGQPREPQVYTLPPSREEMTKNQVSLWCLVKGFYPSDIAVEWESNGQPENNYKTTPPVLDSDGSFFLYSKLTVDKSRWQQGNVFSCSVMHEALHNHYTQKSLSLSPGKGGSGGDYKDDDDK

SEQ ID NO: 157 - protein, 357 aa, Artificial Sequence
  Made in Lab - synthesized Wnt surrogate molecule
MDMRVPAQLLGLLLLWLRGARCDVQLVESGGGLVQPGGSLRLSCTSSANINSIETLGWYRQAPGKQRELIANMRGGGYMKYAGSLKGRFTMSTESAKNTMYLQMNSLKPEDTAVYYCYVKLRDDDYVYRGQGTQVTVSSGGSGSSYVLTQPPSVSVSPGQTASITCSGDKVGHKYASWYQKKPGQKPVLVIYEDSQRPSGIPVRFSGSNSGNTATLTISGTQAMDEADYYCQAWDSSTDVVFGGGTKLTVLGQPKAAPSVTLFPPSSEELQANKATLVCLISDFYPGAVTVAWKADSSPVKAGVETTTPSKQSNNKYAAESYLSLTPEQWKSHRSYSCQVTHEGSTVEKTVAPTECS

SEQ ID NO: 158 - protein, 9 aa, Artificial Sequence
  Synthesized molecular recognition unit - heavy CDR1
ASFSGHYWT

SEQ ID NO: 159 - protein, 11 aa, Artificial Sequence
  Synthesized molecular recognition unit - heavy CDR1
ASVSSNSAAWN

SEQ ID NO: 160 - protein, 11 aa, Artificial Sequence
  Synthesized molecular recognition unit - heavy CDR1
DSVSSNSAAWN

SEQ ID NO: 161 - protein, 11 aa, Artificial Sequence
  Synthesized molecular recognition unit - heavy CDR1
DSVSSNSATWN

SEQ ID NO: 162 - protein, 11 aa, Artificial Sequence
  Synthesized molecular recognition unit - heavy CDR1
DSVSSNSGAWN

SEQ ID NO: 163 - protein, 9 aa, Artificial Sequence
  Synthesized molecular recognition unit - heavy CDR1
DTFSNYVIS

SEQ ID NO: 164 - protein, 9 aa, Artificial Sequence
  Synthesized molecular recognition unit - heavy CDR1
DTFSNYVLS

SEQ ID NO: 165 - protein, 9 aa, Artificial Sequence
  Synthesized molecular recognition unit - heavy CDR1
FAFDDYAMH

SEQ ID NO: 166 - protein, 9 aa, Artificial Sequence
  Synthesized molecular recognition unit - heavy CDR1
FAFSSHWMH

SEQ ID NO: 167 - protein, 9 aa, Artificial Sequence
  Synthesized molecular recognition unit - heavy CDR1
FAFSSYAMS

SEQ ID NO: 168 - protein, 9 aa, Artificial Sequence
  Synthesized molecular recognition unit - heavy CDR1
FAVSSSYMS

SEQ ID NO: 169 - protein, 9 aa, Artificial Sequence
  Synthesized molecular recognition unit - heavy CDR1
FFFSGYWMS

SEQ ID NO: 170 - protein, 9 aa, Artificial Sequence
  Synthesized molecular recognition unit - heavy CDR1
FIFSDYYMS

SEQ ID NO: 171 - protein, 9 aa, Artificial Sequence
  Synthesized molecular recognition unit - heavy CDR1
FIFSZYAMS

SEQ ID NO: 172 - protein, 9 aa, Artificial Sequence
  Synthesized molecular recognition unit - heavy CDR1
FNFGIYSMT

SEQ ID NO: 173 - protein, 9 aa, Artificial Sequence
  Synthesized molecular recognition unit - heavy CDR1
FNFSSYTMR

SEQ ID NO: 174 - protein, 9 aa, Artificial Sequence
  Synthesized molecular recognition unit - heavy CDR1
FNIRRZNMZ

SEQ ID NO: 175 - protein, 9 aa, Artificial Sequence
  Synthesized molecular recognition unit - heavy CDR1
FNLRRYNMN

SEQ ID NO: 176 - protein, 9 aa, Artificial Sequence
  Synthesized molecular recognition unit - heavy CDR1
FPFSTFSMN

SEQ ID NO: 177 - protein, 9 aa, Artificial Sequence
  Synthesized molecular recognition unit - heavy CDR1
FRFISHPIH

SEQ ID NO: 178 - protein, 9 aa, Artificial Sequence
  Synthesized molecular recognition unit - heavy CDR1
FSFRSYSMS

SEQ ID NO: 179 - protein, 9 aa, Artificial Sequence
  Synthesized molecular recognition unit - heavy CDR1
FSFSKKYMT

SEQ ID NO: 180 - protein, 9 aa, Artificial Sequence
  Synthesized molecular recognition unit - heavy CDR1
FSFSRYGMS

SEQ ID NO: 181 - protein, 9 aa, Artificial Sequence
  Synthesized molecular recognition unit - heavy CDR1
FSFSSTAMS

SEQ ID NO: 182 - protein, 9 aa, Artificial Sequence
  Synthesized molecular recognition unit - heavy CDR1
FSFSSYGMH

SEQ ID NO: 183 - protein, 9 aa, Artificial Sequence
  Synthesized molecular recognition unit - heavy CDR1
FSFSSYGMS

SEQ ID NO: 184 - protein, 9 aa, Artificial Sequence
  Synthesized molecular recognition unit - heavy CDR1
FSFSTYTMS

SEQ ID NO: 185 - protein, 9 aa, Artificial Sequence
  Synthesized molecular recognition unit - heavy CDR1
FSLSSYGMH

SEQ ID NO: 186 - protein, 9 aa, Artificial Sequence
  Synthesized molecular recognition unit - heavy CDR1
FSVGSNYMT

SEQ ID NO: 187 - protein, 9 aa, Artificial Sequence
  Synthesized molecular recognition unit - heavy CDR1
FSVSSNYMN

SEQ ID NO: 188 - protein, 9 aa, Artificial Sequence
  Synthesized molecular recognition unit - heavy CDR1
FTFADYGMH

SEQ ID NO: 189 - protein, 9 aa, Artificial Sequence
  Synthesized molecular recognition unit - heavy CDR1
FTFANYAMH

SEQ ID NO: 190 - protein, 9 aa, Artificial Sequence
  Synthesized molecular recognition unit - heavy CDR1
FTFANYAMN

SEQ ID NO: 191 - protein, 9 aa, Artificial Sequence
  Synthesized molecular recognition unit - heavy CDR1
FTFDDYAMH

SEQ ID NO: 192 - protein, 9 aa, Artificial Sequence
  Synthesized molecular recognition unit - heavy CDR1
FTFDDYGMH

SEQ ID NO: 193 - protein, 9 aa, Artificial Sequence
  Synthesized molecular recognition unit - heavy CDR1
FTFDDYYMN

SEQ ID NO: 194 - protein, 9 aa, Artificial Sequence
  Synthesized molecular recognition unit - heavy CDR1
FTFDHNPMN

SEQ ID NO: 195 - protein, 9 aa, Artificial Sequence
  Synthesized molecular recognition unit - heavy CDR1
FTFGNYDMN

SEQ ID NO: 196 - protein, 9 aa, Artificial Sequence
  Synthesized molecular recognition unit - heavy CDR1
FTFGTYWVT

SEQ ID NO: 197 - protein, 9 aa, Artificial Sequence
  Synthesized molecular recognition unit - heavy CDR1
FTFNRHALS

SEQ ID NO: 198 - protein, 9 aa, Artificial Sequence
  Synthesized molecular recognition unit - heavy CDR1
FTFRDYAMN

SEQ ID NO: 199 - protein, 9 aa, Artificial Sequence
  Synthesized molecular recognition unit - heavy CDR1
FTFREYAMT

SEQ ID NO: 200 - protein, 9 aa, Artificial Sequence
  Synthesized molecular recognition unit - heavy CDR1
FTFRMYGMH

SEQ ID NO: 201 - protein, 9 aa, Artificial Sequence
  Synthesized molecular recognition unit - heavy CDR1
FTFRNSAMH

SEQ ID NO: 202 - protein, 9 aa, Artificial Sequence
  Synthesized molecular recognition unit - heavy CDR1
FTFRSYGMH

SEQ ID NO: 203 - protein, 9 aa, Artificial Sequence
  Synthesized molecular recognition unit - heavy CDR1
FTFSDFGMN

SEQ ID NO: 204 - protein, 9 aa, Artificial Sequence
  Synthesized molecular recognition unit - heavy CDR1
FTFSDHYMD

SEQ ID NO: 205 - protein, 9 aa, Artificial Sequence
  Synthesized molecular recognition unit - heavy CDR1
FTFSDHYMS

SEQ ID NO: 206 - protein, 9 aa, Artificial Sequence
  Synthesized molecular recognition unit - heavy CDR1
FTFSDSYMS

SEQ ID NO: 207 - protein, 9 aa, Artificial Sequence
  Synthesized molecular recognition unit - heavy CDR1
FTFSDYGMH

SEQ ID NO: 208 - protein, 9 aa, Artificial Sequence
  Synthesized molecular recognition unit - heavy CDR1
FTFSDYYMS

SEQ ID NO: 209 - protein, 9 aa, Artificial Sequence
  Synthesized molecular recognition unit - heavy CDR1
FTFSIYGMH

SEQ ID NO: 210 - protein, 9 aa, Artificial Sequence
  Synthesized molecular recognition unit - heavy CDR1
FTFSNAQMS

SEQ ID NO: 211 - protein, 9 aa, Artificial Sequence
  Synthesized molecular recognition unit - heavy CDR1
FTFSNAWMS

SEQ ID NO: 212 - protein, 9 aa, Artificial Sequence
  Synthesized molecular recognition unit - heavy CDR1
FTFSNHYMS

SEQ ID NO: 213 - protein, 9 aa, Artificial Sequence
  Synthesized molecular recognition unit - heavy CDR1
FTFSNHYTS

SEQ ID NO: 214 - protein, 9 aa, Artificial Sequence
  Synthesized molecular recognition unit - heavy CDR1
FTFSNSDMN

SEQ ID NO: 215 - protein, 9 aa, Artificial Sequence
  Synthesized molecular recognition unit - heavy CDR1
FTFSNYAMH

SEQ ID NO: 216 - protein, 9 aa, Artificial Sequence
  Synthesized molecular recognition unit - heavy CDR1
FTFSNYAMT

SEQ ID NO: 217 - protein, 9 aa, Artificial Sequence
  Synthesized molecular recognition unit - heavy CDR1
FTFSNYGMH

SEQ ID NO: 218 - protein, 9 aa, Artificial Sequence
  Synthesized molecular recognition unit - heavy CDR1
FTFSNYYTS

SEQ ID NO: 219 - protein, 9 aa, Artificial Sequence
  Synthesized molecular recognition unit - heavy CDR1
FTFSRYAMH

SEQ ID NO: 220 - protein, 9 aa, Artificial Sequence
  Synthesized molecular recognition unit - heavy CDR1
FTFSRYAMS

SEQ ID NO: 221 - protein, 9 aa, Artificial Sequence
  Synthesized molecular recognition unit - heavy CDR1
FTFSSFGMH

SEQ ID NO: 222 - protein, 9 aa, Artificial Sequence
  Synthesized molecular recognition unit - heavy CDR1
FTFSSHSTH

SEQ ID NO: 223 - protein, 9 aa, Artificial Sequence
  Synthesized molecular recognition unit - heavy CDR1
FTFSSNAMH

SEQ ID NO: 224 - protein, 9 aa, Artificial Sequence
  Synthesized molecular recognition unit - heavy CDR1
FTFSSSAMH

SEQ ID NO: 225 - protein, 9 aa, Artificial Sequence
  Synthesized molecular recognition unit - heavy CDR1
FTFSSSNMN

SEQ ID NO: 226 - protein, 9 aa, Artificial Sequence
  Synthesized molecular recognition unit - heavy CDR1
FTFSSSWMH

SEQ ID NO: 227 - protein, 9 aa, Artificial Sequence
  Synthesized molecular recognition unit - heavy CDR1
FTFSSYAMH

SEQ ID NO: 228 - protein, 9 aa, Artificial Sequence
  Synthesized molecular recognition unit - heavy CDR1
FTFSSYAMS

SEQ ID NO: 229 - protein, 9 aa, Artificial Sequence
  Synthesized molecular recognition unit - heavy CDR1
FTFSSYDMN

SEQ ID NO: 230 - protein, 9 aa, Artificial Sequence
  Synthesized molecular recognition unit - heavy CDR1
FTFSSYGMH

SEQ ID NO: 231 - protein, 9 aa, Artificial Sequence
  Synthesized molecular recognition unit - heavy CDR1
FTFSSYGMS

SEQ ID NO: 232 - protein, 9 aa, Artificial Sequence
  Synthesized molecular recognition unit - heavy CDR1
FTFSSYNMN

SEQ ID NO: 233 - protein, 9 aa, Artificial Sequence
  Synthesized molecular recognition unit - heavy CDR1
FTFSSYSMN

SEQ ID NO: 234 - protein, 9 aa, Artificial Sequence
  Synthesized molecular recognition unit - heavy CDR1
FTFSSYSMS

SEQ ID NO: 235 - protein, 9 aa, Artificial Sequence
  Synthesized molecular recognition unit - heavy CDR1
FTFSSYTMN

SEQ ID NO: 236 - protein, 9 aa, Artificial Sequence
  Synthesized molecular recognition unit - heavy CDR1
FTFSSYTMS

SEQ ID NO: 237 - protein, 9 aa, Artificial Sequence
  Synthesized molecular recognition unit - heavy CDR1
FTFSSYVMS

SEQ ID NO: 238 - protein, 9 aa, Artificial Sequence
  Synthesized molecular recognition unit - heavy CDR1
FTFSSYWIH

SEQ ID NO: 239 - protein, 9 aa, Artificial Sequence
  Synthesized molecular recognition unit - heavy CDR1
FTFSSYWMH

SEQ ID NO: 240 - protein, 9 aa, Artificial Sequence
  Synthesized molecular recognition unit - heavy CDR1
FTFSSZZMH

SEQ ID NO: 241 - protein, 9 aa, Artificial Sequence
  Synthesized molecular recognition unit - heavy CDR1
  misc_feature (6)..(6): Xaa can be any naturally occurring amino acid
FTFSTXWMS

SEQ ID NO: 242 - protein, 9 aa, Artificial Sequence
  Synthesized molecular recognition unit - heavy CDR1
FTFSTYAMH

SEQ ID NO: 243 - protein, 9 aa, Artificial Sequence
  Synthesized molecular recognition unit - heavy CDR1
FTFSTYEMN

SEQ ID NO: 244 - protein, 9 aa, Artificial Sequence
  Synthesized molecular recognition unit - heavy CDR1
FTFSTYGMH

SEQ ID NO: 245 - protein, 9 aa, Artificial Sequence
  Synthesized molecular recognition unit - heavy CDR1
FTFSTYSMI

SEQ ID NO: 246 - protein, 9 aa, Artificial Sequence
  Synthesized molecular recognition unit - heavy CDR1
FTFSTYSMS

SEQ ID NO: 247 - protein, 9 aa, Artificial Sequence
  Synthesized molecular recognition unit - heavy CDR1
FTFTGSAVQ

SEQ ID NO: 248 - protein, 9 aa, Artificial Sequence
  Synthesized molecular recognition unit - heavy CDR1
FTFTNYAMS

SEQ ID NO: 249 - protein, 9 aa, Artificial Sequence
  Synthesized molecular recognition unit - heavy CDR1
FTFTSSAMQ

SEQ ID NO: 250 - protein, 9 aa, Artificial Sequence
  Synthesized molecular recognition unit - heavy CDR1
FTFTSSATQ

SEQ ID NO: 251 - protein, 9 aa, Artificial Sequence
  Synthesized molecular recognition unit - heavy CDR1
FTFTSSAVQ

SEQ ID NO: 252 - protein, 9 aa, Artificial Sequence
  Synthesized molecular recognition unit - heavy CDR1
FTFTSYAMH

SEQ ID NO: 253 - protein, 9 aa, Artificial Sequence
  Synthesized molecular recognition unit - heavy CDR1
FTFTZSAVQ

SEQ ID NO: 254 - protein, 9 aa, Artificial Sequence
  Synthesized molecular recognition unit - heavy CDR1
FTFZZSZVQ

SEQ ID NO: 255 - protein, 9 aa, Artificial Sequence
  Synthesized molecular recognition unit - heavy CDR1
FTLDYYAIS

SEQ ID NO: 256 - protein, 9 aa, Artificial Sequence
  Synthesized molecular recognition unit - heavy CDR1
FTLSSHHMN

SEQ ID NO: 257 - protein, 9 aa, Artificial Sequence
  Synthesized molecular recognition unit - heavy CDR1
FTLSTYNMN

SEQ ID NO: 258 - protein, 9 aa, Artificial Sequence
  Synthesized molecular recognition unit - heavy CDR1
FTVGNNYMS

SEQ ID NO: 259 - protein, 9 aa, Artificial Sequence
  Synthesized molecular recognition unit - heavy CDR1
FTVGSWYMS

SEQ ID NO: 260 - protein, 9 aa, Artificial Sequence
  Synthesized molecular recognition unit - heavy CDR1
FTVSSHSMG

SEQ ID NO: 261 - protein, 9 aa, Artificial Sequence
  Synthesized molecular recognition unit - heavy CDR1
FTVSSNYMN

SEQ ID NO: 262 - protein, 9 aa, Artificial Sequence
  Synthesized molecular recognition unit - heavy CDR1
FTVSSNYMS

SEQ ID NO: 263 - protein, 9 aa, Artificial Sequence
  Synthesized molecular recognition unit - heavy CDR1
FTZSSYDMH

SEQ ID NO: 264 - protein, 9 aa, Artificial Sequence
  Synthesized molecular recognition unit - heavy CDR1
FTZSSYSMN

SEQ ID NO: 265 - protein, 9 aa, Artificial Sequence
  Synthesized molecular recognition unit - heavy CDR1
GAFSTSSIS

SEQ ID NO: 266 - protein, 11 aa, Artificial Sequence
  Synthesized molecular recognition unit - heavy CDR1
GAISGTSYFWG

SEQ ID NO: 267 - protein, 9 aa, Artificial Sequence
  Synthesized molecular recognition unit - heavy CDR1
GDFTNYAMA

SEQ ID NO: 268 - protein, 9 aa, Artificial Sequence
  Synthesized molecular recognition unit - heavy CDR1
GFFSSFTMG

SEQ ID NO: 269 - protein, 8 aa, Artificial Sequence
  Synthesized molecular recognition unit - heavy CDR1
GFTFSDHY

SEQ ID NO: 270 - protein, 10 aa, Artificial Sequence
  Synthesized molecular recognition unit - heavy CDR1
GFTFSHYTLS

SEQ ID NO: 271 - protein, 9 aa, Artificial Sequence
  Synthesized molecular recognition unit - heavy CDR1
GNFKNYGIT

SEQ ID NO: 272 - protein, 9 aa, Artificial Sequence
  Synthesized molecular recognition unit - heavy CDR1
GPFNLFAMG

SEQ ID NO: 273 - protein, 9 aa, Artificial Sequence
  Synthesized molecular recognition unit - heavy CDR1
GPFNLLAMG

SEQ ID NO: 274 - protein, 9 aa, Artificial Sequence
  Synthesized molecular recognition unit - heavy CDR1
GSFSGYAIN

SEQ ID NO: 275 - protein, 9 aa, Artificial Sequence
  Synthesized molecular recognition unit - heavy CDR1
GSFSGYAIS

SEQ ID NO: 276 - protein, 9 aa, Artificial Sequence
  Synthesized molecular recognition unit - heavy CDR1
GSFSGYYWH

SEQ ID NO: 277 - protein, 9 aa, Artificial Sequence
  Synthesized molecular recognition unit - heavy CDR1
GSFSGYYWS

SEQ ID NO: 278 - protein, 9 aa, Artificial Sequence
  Synthesized molecular recognition unit - heavy CDR1
GSFSNYAIS

SEQ ID NO: 279 - protein, 9 aa, Artificial Sequence
  Synthesized molecular recognition unit - heavy CDR1
GSFSTSVFG

SEQ ID NO: 280 - protein, 11 aa, Artificial Sequence
  Synthesized molecular recognition unit - heavy CDR1
GSISGNNYYWG

SEQ ID NO: 281 - protein, 11 aa, Artificial Sequence
  Synthesized molecular recognition unit - heavy CDR1
GSISGNNYYZG

SEQ ID NO: 282 - protein, 9 aa, Artificial Sequence
  Synthesized molecular recognition unit - heavy CDR1
GSISNYYWS

SEQ ID NO: 283 - protein, 11 aa, Artificial Sequence
  Synthesized molecular recognition unit - heavy CDR1
GSISSGGYSWS

SEQ ID NO: 284 - protein, 11 aa, Artificial Sequence
  Synthesized molecular recognition unit - heavy CDR1
GSISSGGYYWS

SEQ ID NO: 285 - protein, 11 aa, Artificial Sequence
  Synthesized molecular recognition unit - heavy CDR1
GSISSSSYYWG

SEQ ID NO: 286 - protein, 9 aa, Artificial Sequence
  Synthesized molecular recognition unit - heavy CDR1
GTFGNYGIN

SEQ ID NO: 287 - protein, 9 aa, Artificial Sequence
  Synthesized molecular recognition unit - heavy CDR1
GTFGSYAIT

SEQ ID NO: 288 - protein, 9 aa, Artificial Sequence
  Synthesized molecular recognition unit - heavy CDR1
GTFGSYAVG

SEQ ID NO: 289 - protein, 9 aa, Artificial Sequence
  Synthesized molecular recognition unit - heavy CDR1
GTFNRYAIT

SEQ ID NO: 290 - protein, 9 aa, Artificial Sequence
  Synthesized molecular recognition unit - heavy CDR1
GTFNRYGIS

SEQ ID NO: 291 - protein, 9 aa, Artificial Sequence
  Synthesized molecular recognition unit - heavy CDR1
GTFNSYAIA

SEQ ID NO: 292 - protein, 9 aa, Artificial Sequence
  Synthesized molecular recognition unit - heavy CDR1
GTFRSYAIN

SEQ ID NO: 293 - protein, 9 aa, Artificial Sequence
  Synthesized molecular recognition unit - heavy CDR1
GTFSSNVIS

SEQ ID NO: 294 - protein, 9 aa, Artificial Sequence
  Synthesized molecular recognition unit - heavy CDR1
GTFSSYAIN

SEQ ID NO: 295 - protein, 9 aa, Artificial Sequence
  Synthesized molecular recognition unit - heavy CDR1
GTFSSYAIS

SEQ ID NO: 296 - protein, 9 aa, Artificial Sequence
  Synthesized molecular recognition unit - heavy CDR1
GTFSSYTIS

SEQ ID NO: 297 - protein, 9 aa, Artificial Sequence
  Synthesized molecular recognition unit - heavy CDR1
GTFSSYVIS

SEQ ID NO: 298 - protein, 9 aa, Artificial Sequence
  Synthesized molecular recognition unit - heavy CDR1
GTFSTYAIS

SEQ ID NO: 299 - protein, 9 aa, Artificial Sequence
  Synthesized molecular recognition unit - heavy CDR1
GTFSTYAIS

SEQ ID NO: 300 - protein, 9 aa, Artificial Sequence
  Synthesized molecular recognition unit - heavy CDR1
GTFSTYAMG

SEQ ID NO: 301 - protein, 9 aa, Artificial Sequence
  Synthesized molecular recognition unit - heavy CDR1
GTFSZYAIS

SEQ ID NO: 302 - protein, 9 aa, Artificial Sequence
  Synthesized molecular recognition unit - heavy CDR1
GTFSZZTIS

SEQ ID NO: 303 - protein, 9 aa, Artificial Sequence
  Synthesized molecular recognition unit - heavy CDR1
GTFTNNFMH

SEQ ID NO: 304 - protein, 9 aa, Artificial Sequence
  Synthesized molecular recognition unit - heavy CDR1
GTFTRNSIS

SEQ ID NO: 305 - protein, 9 aa, Artificial Sequence
  Synthesized molecular recognition unit - heavy CDR1
GTFTSYAIS

SEQ ID NO: 306 - protein, 9 aa, Artificial Sequence
  Synthesized molecular recognition unit - heavy CDR1
GTFTSYPIS

SEQ ID NO: 307 - protein, 9 aa, Artificial Sequence
  Synthesized molecular recognition unit - heavy CDR1
GTFTYRYLH

SEQ ID NO: 308 - protein, 9 aa, Artificial Sequence
  Synthesized molecular recognition unit - heavy CDR1
GTLNNHTLS

SEQ ID NO: 309 - protein, 9 aa, Artificial Sequence
  Synthesized molecular recognition unit - heavy CDR1
GTSSTYAMG

SEQ ID NO: 310 - protein, 10 aa, Artificial Sequence
  Synthesized molecular recognition unit - heavy CDR1
HDFSSTYGVG

SEQ ID NO: 311 - protein, 10 aa, Artificial Sequence
  Synthesized molecular recognition unit - heavy CDR1
HDFSSTYGVG

SEQ ID NO: 312 - protein, 9 aa, Artificial Sequence
  Synthesized molecular recognition unit - heavy CDR1
HTFSGYHIH

SEQ ID NO: 313 - protein, 9 aa, Artificial Sequence
  Synthesized molecular recognition unit - heavy CDR1
IIFSPNDMG

SEQ ID NO: 314 - protein, 11 aa, Artificial Sequence
  Synthesized molecular recognition unit - heavy CDR1
IKSMFDMNFMG

SEQ ID NO: 315 - protein, 9 aa, Artificial Sequence
  Synthesized molecular recognition unit - heavy CDR1
ITFGFDSVG

SEQ ID NO: 316 - protein, 9 aa, Artificial Sequence
  Synthesized molecular recognition unit - heavy CDR1
ITFSFNSVG

SEQ ID NO: 317 - protein, 9 aa, Artificial Sequence
  Synthesized molecular recognition unit - heavy CDR1
LAFNGYTMG

SEQ ID NO: 318 - protein, 9 aa, Artificial Sequence
  Synthesized molecular recognition unit - heavy CDR1
LAIDDYYMV

SEQ ID NO: 319 - protein, 9 aa, Artificial Sequence
  Synthesized molecular recognition unit - heavy CDR1
LTFSDYTVG

SEQ ID NO: 320 - protein, 9 aa, Artificial Sequence
  Synthesized molecular recognition unit - heavy CDR1
LTFSIYAMH

SEQ ID NO: 321 - protein, 9 aa, Artificial Sequence
  Synthesized molecular recognition unit - heavy CDR1
LTFSTYGMG

SEQ ID NO: 322 - protein, 9 aa, Artificial Sequence
  Synthesized molecular recognition unit - heavy CDR1
LTIDDYYMV

SEQ ID NO: 323 - protein, 9 aa, Artificial Sequence
  Synthesized molecular recognition unit - heavy CDR1
LTIDDYYVV

SEQ ID NO: 324 - protein, 9 aa, Artificial Sequence
  Synthesized molecular recognition unit - heavy CDR1
LTVSTNFMS

SEQ ID NO: 325 - protein, 9 aa, Artificial Sequence
  Synthesized molecular recognition unit - heavy CDR1
NFFSNYPLG

SEQ ID NO: 326 - protein, 9 aa, Artificial Sequence
  Synthesized molecular recognition unit - heavy CDR1
NIFRIYAIA

SEQ ID NO: 327 - protein, 9 aa, Artificial Sequence
  Synthesized molecular recognition unit - heavy CDR1
QTFTAYAMG

SEQ ID NO: 328 - protein, 9 aa, Artificial Sequence
  Synthesized molecular recognition unit - heavy CDR1
RAFSNYAMG

SEQ ID NO: 329 - protein, 9 aa, Artificial Sequence
  Synthesized molecular recognition unit - heavy CDR1
RAFTDNVMA

SEQ ID NO: 330 - protein, 9 aa, Artificial Sequence
  Synthesized molecular recognition unit - heavy CDR1
RIFSSYAQA

SEQ ID NO: 331 - protein, 9 aa, Artificial Sequence
  Synthesized molecular recognition unit - heavy CDR1
RMFSNYAMG

SEQ ID NO: 332 - protein, 9 aa, Artificial Sequence
  Synthesized molecular recognition unit - heavy CDR1
RRFTTYGMG

SEQ ID NO: 333 - protein, 9 aa, Artificial Sequence
  Synthesized molecular recognition unit - heavy CDR1
RSFRTNALG

SEQ ID NO: 334 - protein, 9 aa, Artificial Sequence
  Synthesized molecular recognition unit - heavy CDR1
RSFSIYNTA

SEQ ID NO: 335 - protein, 9 aa, Artificial Sequence
  Synthesized molecular recognition unit - heavy CDR1
RSFSNYRVA

SEQ ID NO: 336 - protein, 9 aa, Artificial Sequence
  Synthesized molecular recognition unit - heavy CDR1
RSFSTYPMG

SEQ ID NO: 337 - protein, 9 aa, Artificial Sequence
  Synthesized molecular recognition unit - heavy CDR1
RTDGGYVMG

SEQ ID NO: 338 - protein, 9 aa, Artificial Sequence
  Synthesized molecular recognition unit - heavy CDR1
RTDGMQAMG

SEQ ID NO: 339 - protein, 9 aa, Artificial Sequence
  Synthesized molecular recognition unit - heavy CDR1
RTFGSYAMG

SEQ ID NO: 340 - protein, 9 aa, Artificial Sequence
  Synthesized molecular recognition unit - heavy CDR1
RTFGTWAMG

SEQ ID NO: 341 - protein, 9 aa, Artificial Sequence
  Synthesized molecular recognition unit - heavy CDR1
RTFNRHVMG

SEQ ID NO: 342 - protein, 9 aa, Artificial Sequence
  Synthesized molecular recognition unit - heavy CDR1
RTFRAYAMG

SEQ ID NO: 343 - protein, 9 aa, Artificial Sequence
  Synthesized molecular recognition unit - heavy CDR1
RTFSEYAMG

SEQ ID NO: 344 - protein, 9 aa, Artificial Sequence
  Synthesized molecular recognition unit - heavy CDR1
RTFSNYVMG

SEQ ID NO: 345 - protein, 9 aa, Artificial Sequence
  Synthesized molecular recognition unit - heavy CDR1
RTFSSAAMG

SEQ ID NO: 346 - protein, 9 aa, Artificial Sequence
  Synthesized molecular recognition unit - heavy CDR1
RTFSSFVMG

SEQ ID NO: 347 - protein, 9 aa, Artificial Sequence
  Synthesized molecular recognition unit - heavy CDR1
RTFSSYAMG

SEQ ID NO: 348 - protein, 9 aa, Artificial Sequence
  Synthesized molecular recognition unit - heavy CDR1
RTFSSYSLA

SEQ ID NO: 349 - protein, 9 aa, Artificial Sequence
  Synthesized molecular recognition unit - heavy CDR1
RTFSTYGMG

SEQ ID NO: 350 - protein, 9 aa, Artificial Sequence
  Synthesized molecular recognition unit - heavy CDR1
RTFSWYSMG

SEQ ID NO: 351 - protein, 9 aa, Artificial Sequence
  Synthesized molecular recognition unit - heavy CDR1
RTLSSYVVG

SEQ ID NO: 352 - protein, 9 aa, Artificial Sequence
  Synthesized molecular recognition unit - heavy CDR1
RTSDLYTMG

SEQ ID NO: 353 - protein, 9 aa, Artificial Sequence
  Synthesized molecular recognition unit - heavy CDR1
RTSSSYAMG

SEQ ID NO: 354 - protein, 9 aa, Artificial Sequence
  Synthesized molecular recognition unit - heavy CDR1
RVFSSYAQA

SEQ ID NO: 355 - protein, 9 aa, Artificial Sequence
  Synthesized molecular recognition unit - heavy CDR1
SAFSNYAMG

SEQ ID NO: 356 - protein, 9 aa, Artificial Sequence
  Synthesized molecular recognition unit - heavy CDR1
SIDSINAMA

SEQ ID NO: 357 - protein, 9 aa, Artificial Sequence
  Synthesized molecular recognition unit - heavy CDR1
SIFSINAMG

SEQ ID NO: 358 - protein, 9 aa, Artificial Sequence
  Synthesized molecular recognition unit - heavy CDR1
SIFSIYAMG

SEQ ID NO: 359 - protein, 9 aa, Artificial Sequence
  Synthesized molecular recognition unit - heavy CDR1
SIFSSNTIY

SEQ ID NO: 360 - protein, 9 aa, Artificial Sequence
  Synthesized molecular recognition unit - heavy CDR1
SLFRLNGMG

SEQ ID NO: 361 - protein, 9 aa, Artificial Sequence
  Synthesized molecular recognition unit - heavy CDR1
STFSNYAMG

SEQ ID NO: 362 - protein, 9 aa, Artificial Sequence
  Synthesized molecular recognition unit - heavy CDR1
STFSTYAMG

SEQ ID NO: 363 - protein, 9 aa, Artificial Sequence
  Synthesized molecular recognition unit - heavy CDR1
STFTNAWMS

SEQ ID NO: 364 - protein, 9 aa, Artificial Sequence
  Synthesized molecular recognition unit - heavy CDR1
SVVNFVVMG

SEQ ID NO: 365 - protein, 9 aa, Artificial Sequence
  Synthesized molecular recognition unit - heavy CDR1
TTLNKYAIS

SEQ ID NO: 366 - protein, 9 aa, Artificial Sequence
  Synthesized molecular recognition unit - heavy CDR1
VSFSGYAMH

SEQ ID NO: 367 - protein, 9 aa, Artificial Sequence
  Synthesized molecular recognition unit - heavy CDR1
YDFTTYGIH

SEQ ID NO: 368 - protein, 9 aa, Artificial Sequence
  Synthesized molecular recognition unit - heavy CDR1
YIFTDYYMH

SEQ ID NO: 369 - protein, 9 aa, Artificial Sequence
  Synthesized molecular recognition unit - heavy CDR1
YIFTGYYMH

SEQ ID NO: 370 - protein, 9 aa, Artificial Sequence
  Synthesized molecular recognition unit - heavy CDR1
YSFTNYAMH

SEQ ID NO: 371 - protein, 9 aa, Artificial Sequence
  Synthesized molecular recognition unit - heavy CDR1
YSFTTYGMN

SEQ ID NO: 372 - protein, 9 aa, Artificial Sequence
  Synthesized molecular recognition unit - heavy CDR1
YTFASYDIH

SEQ ID NO: 373 - protein, 9 aa, Artificial Sequence
  Synthesized molecular recognition unit - heavy CDR1
YTFASYGMH

SEQ ID NO: 374 - protein, 9 aa, Artificial Sequence
  Synthesized molecular recognition unit - heavy CDR1
YTFSGYYLH

SEQ ID NO: 375 - protein, 9 aa, Artificial Sequence
  Synthesized molecular recognition unit - heavy CDR1
YTFTDYHMH

SEQ ID NO: 376 - protein, 9 aa, Artificial Sequence
  Synthesized molecular recognition unit - heavy CDR1
YTFTDYYMH

SEQ ID NO: 377 - protein, 9 aa, Artificial Sequence
  Synthesized molecular recognition unit - heavy CDR1
YTFTGHYIH

SEQ ID NO: 378 - protein, 9 aa, Artificial Sequence
  Synthesized molecular recognition unit - heavy CDR1
YTFTGHYMH

SEQ ID NO: 379 - protein, 9 aa, Artificial Sequence
  Synthesized molecular recognition unit - heavy CDR1
YTFTGYYMH

SEQ ID NO: 380 - protein, 9 aa, Artificial Sequence
  Synthesized molecular recognition unit - heavy CDR1
YTFTHSYIH

SEQ ID NO: 381 - protein, 9 aa, Artificial Sequence
  Synthesized molecular recognition unit - heavy CDR1
YTFTKDYMH

SEQ ID NO: 382 - protein, 9 aa, Artificial Sequence
  Synthesized molecular recognition unit - heavy CDR1
YTFTNHFMH

SEQ ID NO: 383 - protein, 9 aa, Artificial Sequence
  Synthesized molecular recognition unit - heavy CDR1
YTFTNNFMH

SEQ ID NO: 384 - protein, 9 aa, Artificial Sequence
  Synthesized molecular recognition unit - heavy CDR1
YTFTNYCTR

SEQ ID NO: 385 - protein, 9 aa, Artificial Sequence
  Synthesized molecular recognition unit - heavy CDR1
YTFTRYAVH

SEQ ID NO: 386 - protein, 9 aa, Artificial Sequence
  Synthesized molecular recognition unit - heavy CDR1
YTFTSHWMH

SEQ ID NO: 387 - protein, 9 aa, Artificial Sequence
  Synthesized molecular recognition unit - heavy CDR1
YTFTSSAIH

SEQ ID NO: 388 - protein, 9 aa, Artificial Sequence
  Synthesized molecular recognition unit - heavy CDR1
YTFTSYAIS

SEQ ID NO: 389 - protein, 9 aa, Artificial Sequence
  Synthesized molecular recognition unit - heavy CDR1
YTFTSYAMH

SEQ ID NO: 390 - protein, 9 aa, Artificial Sequence
  Synthesized molecular recognition unit - heavy CDR1
YTFTSYDIN

SEQ ID NO: 391 - protein, 9 aa, Artificial Sequence
  Synthesized molecular recognition unit - heavy CDR1
YTFTSYGIS

SEQ ID NO: 392 - protein, 9 aa, Artificial Sequence
  Synthesized molecular recognition unit - heavy CDR1
YTFTSYYMH

SEQ ID NO: 393 - protein, 9 aa, Artificial Sequence
  Synthesized molecular recognition unit - heavy CDR1
YTFTTYFMH

SEQ ID NO: 394 - protein, 9 aa, Artificial Sequence
  Synthesized molecular recognition unit - heavy CDR1
YTFTYRYLH

SEQ ID NO: 395 - protein, 9 aa, Artificial Sequence
  Synthesized molecular recognition unit - heavy CDR1
YTFTYYAMH

SEQ ID NO: 396 - protein, 9 aa, Artificial Sequence
  Synthesized molecular recognition unit - heavy CDR1
YTITTYAIH

SEQ ID NO: 397 - protein, 9 aa, Artificial Sequence
  Synthesized molecular recognition unit - heavy CDR1
YTLSNYGIS

SEQ ID NO: 398 - protein, 9 aa, Artificial Sequence
  Synthesized molecular recognition unit - heavy CDR1
  misc_feature (9)..(9): Xaa can be any naturally occurring amino acid
YTLTTWYMX

SEQ ID NO: 399 - protein, 9 aa, Artificial Sequence
  Synthesized molecular recognition unit - heavy CDR1
YTVTSYAMH

SEQ ID NO: 400 - protein, 9 aa, Artificial Sequence
  Synthesized molecular recognition unit - heavy CDR1
YZFZZZYMH

SEQ ID NO: 401 - protein, 9 aa, Artificial Sequence
  Synthesized molecular recognition unit - heavy CDR1
ZSVSSNYMS

SEQ ID NO: 402 - protein, 9 aa, Artificial Sequence
  Synthesized molecular recognition unit - heavy CDR1
ZTFSZYDMH

SEQ ID NO: 403 - protein, 9 aa, Artificial Sequence
  Synthesized molecular recognition unit - heavy CDR1
ZZZTDYYZQ

SEQ ID NO: 404 - protein, 17 aa, Artificial Sequence
  Synthesized molecular recognition unit - heavy CDR2
AAIGYKVKWNGERTYYL

SEQ ID NO: 405 - protein, 13 aa, Artificial Sequence
  Synthesized molecular recognition unit - heavy CDR2
AAINRSGGSTYYA

SEQ ID NO: 406 - protein, 13 aa, Artificial Sequence
  Synthesized molecular recognition unit - heavy CDR2
AAINWSGDSAYYA

SEQ ID NO: 407 - protein, 13 aa, Artificial Sequence
  Synthesized molecular recognition unit - heavy CDR2
AAINWSGRSTVYA

SEQ ID NO: 408 - protein, 13 aa, Artificial Sequence
  Synthesized molecular recognition unit - heavy CDR2
AAISGSGENTYYA

SEQ ID NO: 409 - protein, 13 aa, Artificial Sequence
  Synthesized molecular recognition unit - heavy CDR2
AAISRNGVYTRFA

SEQ ID NO: 410 - protein, 13 aa, Artificial Sequence
  Synthesized molecular recognition unit - heavy CDR2
AAISSGGSGTYYS

SEQ ID NO: 411 - protein, 13 aa, Artificial Sequence
  Synthesized molecular recognition unit - heavy CDR2
AAISWGGGSTFYS

SEQ ID NO: 412 - protein, 12 aa, Artificial Sequence
  Synthesized molecular recognition unit - heavy CDR2
AAISWMSNTYYA

SEQ ID NO: 413 - protein, 11 aa, Artificial Sequence
  Synthesized molecular recognition unit - heavy CDR2
AAISWRGTNIA

SEQ ID NO: 414 - protein, 12 aa, Artificial Sequence
  Synthesized molecular recognition unit - heavy CDR2
AAISWSDNTYYA

SEQ ID NO: 415 - protein, 13 aa, Artificial Sequence
  Synthesized molecular recognition unit - heavy CDR2
AAISWSGDSTYYA

SEQ ID NO: 416 - protein, 13 aa, Artificial Sequence
  Synthesized molecular recognition unit - heavy CDR2
AAISWSGDSTYYL

SEQ ID NO: 417 - protein, 13 aa, Artificial Sequence
  Synthesized molecular recognition unit - heavy CDR2
AAISWSGGSTHYA

SEQ ID NO: 418 - protein, 13 aa, Artificial Sequence
  Synthesized molecular recognition unit - heavy CDR2
AAISWSGGSTYYA

SEQ ID NO: 419 - protein, 13 aa, Artificial Sequence
  Synthesized molecular recognition unit - heavy CDR2
AAISWSGRSTYYA

SEQ ID NO: 420 - protein, 13 aa, Artificial Sequence
  Synthesized molecular recognition unit - heavy CDR2
AAISWSGSATHYA

SEQ ID NO: 421 - protein, 13 aa, Artificial Sequence
  Synthesized molecular recognition unit - heavy CDR2
AAISWSGSTAYYA

SEQ ID NO: 422 - protein, 13 aa, Artificial Sequence
  Synthesized molecular recognition unit - heavy CDR2
AAISWTGGSTYYA

SEQ ID NO: 423 - protein, 13 aa, Artificial Sequence
  Synthesized molecular recognition unit - heavy CDR2
AAISYDESNKFYA

SEQ ID NO: 424 - protein, 13 aa, Artificial Sequence
  Synthesized molecular recognition unit - heavy CDR2
AAISYNGFSTYYS

SEQ ID NO: 425 - protein, 12 aa, Artificial Sequence
  Synthesized molecular recognition unit - heavy CDR2
AAITSGGSTNYA

SEQ ID NO: 426 - protein, 13 aa, Artificial Sequence
  Synthesized molecular recognition unit - heavy CDR2
AAITWSGARTYYA

SEQ ID NO: 427 - protein, 12 aa, Artificial Sequence
  Synthesized molecular recognition unit - heavy CDR2
AALTGQRTTNYA

SEQ ID NO: 428 - protein, 12 aa, Artificial Sequence
  Synthesized molecular recognition unit - heavy CDR2
AALTSGGITYHA

SEQ ID NO: 429 - protein, 13 aa, Artificial Sequence
  Synthesized molecular recognition unit - heavy CDR2
AAVNWRGDGTYYS

SEQ ID NO: 430 - protein, 13 aa, Artificial Sequence
  Synthesized molecular recognition unit - heavy CDR2
AAVNWSGGSTYYA

SEQ ID NO: 431 - protein, 13 aa, Artificial Sequence
  Synthesized molecular recognition unit - heavy CDR2
AAVSASGANTYYA

SEQ ID NO: 432 - protein, 13 aa, Artificial Sequence
  Synthesized molecular recognition unit - heavy CDR2
AAVSASGGYTWYA

SEQ ID NO: 433 - protein, 13 aa, Artificial Sequence
  Synthesized molecular recognition unit - heavy CDR2
AAVSWSGVSTYYP

SEQ ID NO: 434 - protein, 13 aa, Artificial Sequence
  Synthesized molecular recognition unit - heavy CDR2
AAVTASGGYAWYA

SEQ ID NO: 435 - protein, 13 aa, Artificial Sequence
  Synthesized molecular recognition unit - heavy CDR2
AAVTWRAGSTYYA

SEQ ID NO: 436 - protein, 13 aa, Artificial Sequence
  Synthesized molecular recognition unit - heavy CDR2
AAVTWRSGSTYYA

SEQ ID NO: 437 - protein, 12 aa, Artificial Sequence
  Synthesized molecular recognition unit - heavy CDR2
ADITSGGSTNYA

SEQ ID NO: 438 - protein, 12 aa, Artificial Sequence
  Synthesized molecular recognition unit - heavy CDR2
AFITRGGTTRYG

SEQ ID NO: 439 - protein, 12 aa, Artificial Sequence
  Synthesized molecular recognition unit - heavy CDR2
AGIASDSTTFYA

SEQ ID NO: 440 - protein, 13 aa, Artificial Sequence
  Synthesized molecular recognition unit - heavy CDR2
AGIGWDSTNIGYA

SEQ ID NO: 441 - protein, 13 aa, Artificial Sequence
  Synthesized molecular recognition unit - heavy CDR2
AGINWNGGSVVYA

SEQ ID NO: 442 - protein, 13 aa, Artificial Sequence
  Synthesized molecular recognition unit - heavy CDR2
AGISASGGSTYYA

SEQ ID NO: 443 - protein, 13 aa, Artificial Sequence
  Synthesized molecular recognition unit - heavy CDR2
AGISGGGGSTDYA

SEQ ID NO: 444 - protein, 13 aa, Artificial Sequence
  Synthesized molecular recognition unit - heavy CDR2
AGISGSGKTTFYA

SEQ ID NO: 445 - protein, 13 aa, Artificial Sequence
  Synthesized molecular recognition unit - heavy CDR2
AGISRTGGNTGYA

SEQ ID NO: 446 - protein, 13 aa, Artificial Sequence
  Synthesized molecular recognition unit - heavy CDR2
AGISWNSGTIDYA

SEQ ID NO: 447 - protein, 13 aa, Artificial Sequence
  Synthesized molecular recognition unit - heavy CDR2
AGVSIDANKKYYA

SEQ ID NO: 448 - protein, 13 aa, Artificial Sequence
  Synthesized molecular recognition unit - heavy CDR2
AIVSYDGTYKYYS

SEQ ID NO: 449 - protein, 13 aa, Artificial Sequence
  Synthesized molecular recognition unit - heavy CDR2
ALISLSGASTYYA

SEQ ID NO: 450 - protein, 12 aa, Artificial Sequence
  Synthesized molecular recognition unit - heavy CDR2
ALISSGGSTSYA

SEQ ID NO: 451 - protein, 13 aa, Artificial Sequence
  Synthesized molecular recognition unit - heavy CDR2
ALISSNGDHKYYT

SEQ ID NO: 452 - protein, 13 aa, Artificial Sequence
  Synthesized molecular recognition unit - heavy CDR2
ALISYDGGNKYYA

SEQ ID NO: 453 - protein, 13 aa, Artificial Sequence
  Synthesized molecular recognition unit - heavy CDR2
ALISYDGGTKYYA

SEQ ID NO: 454 - protein, 13 aa, Artificial Sequence
  Synthesized molecular recognition unit - heavy CDR2
ALISYDGSHTYYA

SEQ ID NO: 455 - protein, 12 aa, Artificial Sequence
  Synthesized molecular recognition unit - heavy CDR2
ALITTSGNTNYA

SEQ ID NO: 456 - protein, 13 aa, Artificial Sequence
  Synthesized molecular recognition unit - heavy CDR2
ALMSPDGTIIYYA

SEQ ID NO: 457 - protein, 13 aa, Artificial Sequence
  Synthesized molecular recognition unit - heavy CDR2
ALTSYDGSKKFYA

SEQ ID NO: 458 - protein, 13 aa, Artificial Sequence
  Synthesized molecular recognition unit - heavy CDR2
ALVGYDGSQQFYG

SEQ ID NO: 459 - protein, 13 aa, Artificial Sequence
  Synthesized molecular recognition unit - heavy CDR2
ANIKQDGSEKYYV

SEQ ID NO: 460 - protein, 13 aa, Artificial Sequence
  Synthesized molecular recognition unit - heavy CDR2
AQISWTGGSTDYA

SEQ ID NO: 461 - protein, 12 aa, Artificial Sequence
  Synthesized molecular recognition unit - heavy CDR2
ASIPSDGTTFYA

SEQ ID NO: 462 - protein, 13 aa, Artificial Sequence
  Synthesized molecular recognition unit - heavy CDR2
ASITWNGRYTYYA

SEQ ID NO: 463 - protein, 13 aa, Artificial Sequence
  Synthesized molecular recognition unit - heavy CDR2
ASIWFDGSNQDYA

SEQ ID NO: 464 - protein, 13 aa, Artificial Sequence
  Synthesized molecular recognition unit - heavy CDR2
ASSTGGGVFENYA

SEQ ID NO: 465 - protein, 12 aa, Artificial Sequence
  Synthesized molecular recognition unit - heavy CDR2
ATIQSGGRTNYA

SEQ ID NO: 466 - protein, 13 aa, Artificial Sequence
  Synthesized molecular recognition unit - heavy CDR2
ATISGGGGSTFDD

SEQ ID NO: 467 - protein, 12 aa, Artificial Sequence
  Synthesized molecular recognition unit - heavy CDR2
ATISTRGTTHYA

SEQ ID NO: 468 - protein, 11 aa, Artificial Sequence
  Synthesized molecular recognition unit - heavy CDR2
ATISWGGTNIA

SEQ ID NO: 469 - protein, 13 aa, Artificial Sequence
  Synthesized molecular recognition unit - heavy CDR2
ATVTWRTGTTYYA

SEQ ID NO: 470 - protein, 12 aa, Artificial Sequence
  Synthesized molecular recognition unit - heavy CDR2
AVFIAGYGAYYA

SEQ ID NO: 471 - protein, 12 aa, Artificial Sequence
  Synthesized molecular recognition unit - heavy CDR2
AVFNAGYRAYYA

SEQ ID NO: 472 - protein, 13 aa, Artificial Sequence
  Synthesized molecular recognition unit - heavy CDR2
AVISRSGGNTYYT

SEQ ID NO: 473 - protein, 13 aa, Artificial Sequence
  Synthesized molecular recognition unit - heavy CDR2
AVISSDGNNKYYT

SEQ ID NO: 474 - protein, 13 aa, Artificial Sequence
  Synthesized molecular recognition unit - heavy CDR2
AVISYDGSNEYYA

SEQ ID NO: 475 - protein, 13 aa, Artificial Sequence
  Synthesized molecular recognition unit - heavy CDR2
AVISYDGSNKYYA

SEQ ID NO: 476 - protein, 13 aa, Artificial Sequence
  Synthesized molecular recognition unit - heavy CDR2
AVISYDGSNRZYA

SEQ ID NO: 477 - protein, 13 aa, Artificial Sequence
  Synthesized molecular recognition unit - heavy CDR2
AVITSGGTFKYYA

SEQ ID NO: 478 - protein, 12 aa, Artificial Sequence
  Synthesized molecular recognition unit - heavy CDR2
AVMYSGGTTYYA

SEQ ID NO: 479 - protein, 12 aa, Artificial Sequence
  Synthesized molecular recognition unit - heavy CDR2
AVSWSVGMTYYA

SEQ ID NO: 480 - protein, 13 aa, Artificial Sequence
  Synthesized molecular recognition unit - heavy CDR2
AVTWYDGSNKYYA

SEQ ID NO: 481 - protein, 12 aa, Artificial Sequence
  Synthesized molecular recognition unit - heavy CDR2
AVVATGGATNYA

SEQ ID NO: 482 - protein, 13 aa, Artificial Sequence
  Synthesized molecular recognition unit - heavy CDR2
AYINSGSSEMNYA

SEQ ID NO: 483 - protein, 13 aa, Artificial Sequence
  Synthesized molecular recognition unit - heavy CDR2
AYINSRGSLMYYA

SEQ ID NO: 484 - protein, 13 aa, Artificial Sequence
  Synthesized molecular recognition unit - heavy CDR2
GAISRTGSGTFYA

SEQ ID NO: 485 - protein, 13 aa, Artificial Sequence
  Synthesized molecular recognition unit - heavy CDR2
GAITWSLGIAFYA

SEQ ID NO: 486 - protein, 13 aa, Artificial Sequence
  Synthesized molecular recognition unit - heavy CDR2
GAITWSLGSAFYA

SEQ ID NO: 487 - protein, 12 aa, Artificial Sequence
  Synthesized molecular recognition unit - heavy CDR2
GEIDHTGSTNYE

SEQ ID NO: 488 - protein, 12 aa, Artificial Sequence
  Synthesized molecular recognition unit - heavy CDR2
GEIDRSGDTNYN

SEQ ID NO: 489 - protein, 12 aa, Artificial Sequence
  Synthesized molecular recognition unit - heavy CDR2
GEINHSGSTNYN

SEQ ID NO: 490 - protein, 15 aa, Artificial Sequence
  Synthesized molecular recognition unit - heavy CDR2
GFIRSKAYGGTTEYA

SEQ ID NO: 491 - protein, 15 aa, Artificial Sequence
  Synthesized molecular recognition unit - heavy CDR2
GFIRSKDYGGTTEYA

SEQ ID NO: 492 - protein, 13 aa, Artificial Sequence
  Synthesized molecular recognition unit - heavy CDR2
GGFDPEDGETIYA

SEQ ID NO: 493 - protein, 13 aa, Artificial Sequence
  Synthesized molecular recognition unit - heavy CDR2
GGIFPIFGTANYA

SEQ ID NO: 494 - protein, 13 aa, Artificial Sequence
  Synthesized molecular recognition unit - heavy CDR2
GGIFPIYGISTYA

SEQ ID NO: 495 - protein, 13 aa, Artificial Sequence
  Synthesized molecular recognition unit - heavy CDR2
GGIIPFFNTVNYA

SEQ ID NO: 496 - protein, 13 aa, Artificial Sequence
  Synthesized molecular recognition unit - heavy CDR2
GGIIPIFGIANYA

SEQ ID NO: 497 - protein, 13 aa, Artificial Sequence
  Synthesized molecular recognition unit - heavy CDR2
GGIIPIFGTAKYA

SEQ ID NO: 498 - protein, 13 aa, Artificial Sequence
  Synthesized molecular recognition unit - heavy CDR2
GGIIPIFGTANHA

SEQ ID NO: 499 - protein, 13 aa, Artificial Sequence
  Synthesized molecular recognition unit - heavy CDR2
GGIIPIFGTANYA

SEQ ID NO: 500 - protein, 13 aa, Artificial Sequence
  Synthesized molecular recognition unit - heavy CDR2
GGIIPIFGTAZYA

SEQ ID NO: 501 - protein, 13 aa, Artificial Sequence
  Synthesized molecular recognition unit - heavy CDR2
GGIIPIFGTGNYA

SEQ ID NO: 502 - protein, 13 aa, Artificial Sequence
  Synthesized molecular recognition unit - heavy CDR2
GGIIPIFGTPHYA

SEQ ID NO: 503 - protein, 13 aa, Artificial Sequence
  Synthesized molecular recognition unit - heavy CDR2
GGIIPIFGTTNYA

SEQ ID NO: 504 - protein, 13 aa, Artificial Sequence
  Synthesized molecular recognition unit - heavy CDR2
GGIIPILGIANYA

SEQ ID NO: 505 - protein, 13 aa, Artificial Sequence
  Synthesized molecular recognition unit - heavy CDR2
GGIIPISGKTDYA

SEQ ID NO: 506 - protein, 13 aa, Artificial Sequence
  Synthesized molecular recognition unit - heavy CDR2
GGIIPLFGTANYA

SEQ ID NO: 507 - protein, 13 aa, Artificial Sequence
  Synthesized molecular recognition unit - heavy CDR2
GGIIPLFGTTDYA

SEQ ID NO: 508 - protein, 13 aa, Artificial Sequence
  Synthesized molecular recognition unit - heavy CDR2
GGIIPRLGATDYA

SEQ ID NO: 509 - protein, 13 aa, Artificial Sequence
  Synthesized molecular recognition unit - heavy CDR2
GGILPIYGTTKYA

SEQ ID NO: 510 - protein, 13 aa, Artificial Sequence
  Synthesized molecular recognition unit - heavy CDR2
GGMNZNRGNTGYA

SEQ ID NO: 511 - protein, 13 aa, Artificial Sequence
  Synthesized molecular recognition unit - heavy CDR2
GGVIPAFGATDYS

SEQ ID NO: 512 - protein, 13 aa, Artificial Sequence
  Synthesized molecular recognition unit - heavy CDR2
GIINPSGGRTTYA

SEQ ID NO: 513 - protein, 13 aa, Artificial Sequence
  Synthesized molecular recognition unit - heavy CDR2
GIINPSGGSTSYA

SEQ ID NO: 514 - protein, 13 aa, Artificial Sequence
  Synthesized molecular recognition unit - heavy CDR2
GIINPSSGRTDYA

SEQ ID NO: 515 - protein, 13 aa, Artificial Sequence
  Synthesized molecular recognition unit - heavy CDR2
GIISPGGGRTIYA

SEQ ID NO: 516 - protein, 13 aa, Artificial Sequence
  Synthesized molecular recognition unit - heavy CDR2
GIISPSGGSTSYA

SEQ ID NO: 517 - protein, 13 aa, Artificial Sequence
  Synthesized molecular recognition unit - heavy CDR2
GIIZPGGGRTIYA

SEQ ID NO: 518 - protein, 13 aa, Artificial Sequence
  Synthesized molecular recognition unit - heavy CDR2
GLISRNAGNTLYA

SEQ ID NO: 519 - protein, 13 aa, Artificial Sequence
  Synthesized molecular recognition unit - heavy CDR2
GLVCPSDGSTSYA

SEQ ID NO: 520 - protein, 13 aa, Artificial Sequence
  Synthesized molecular recognition unit - heavy CDR2
GLVDPEDGETIYA

SEQ ID NO: 521 - protein, 13 aa, Artificial Sequence
  Synthesized molecular recognition unit - heavy CDR2
GMIIPFLGITNYA

SEQ ID NO: 522 - protein, 13 aa, Artificial Sequence
  Synthesized molecular recognition unit - heavy CDR2
GMINPIGGSINYA

SEQ ID NO: 523 - protein, 13 aa, Artificial Sequence
  Synthesized molecular recognition unit - heavy CDR2
GMINPSGGSTTYA

SEQ ID NO: 524 - protein, 14 aa, Artificial Sequence
  Synthesized molecular recognition unit - heavy CDR2
GRAYYKSRWYYDYA

SEQ ID NO: 525 - protein, 13 aa, Artificial Sequence
  Synthesized molecular recognition unit - heavy CDR2
GRIIPALGTANYA

SEQ ID NO: 526 - protein, 13 aa, Artificial Sequence
  Synthesized molecular recognition unit - heavy CDR2
GRIIPIFGTANYA

SEQ ID NO: 527 - protein, 13 aa, Artificial Sequence
  Synthesized molecular recognition unit - heavy CDR2
GRIIPIFGTAZYA

SEQ ID NO: 528 - protein, 13 aa, Artificial Sequence
  Synthesized molecular recognition unit - heavy CDR2
GRIIPIFGTVNYA

SEQ ID NO: 529 - protein, 13 aa, Artificial Sequence
  Synthesized molecular recognition unit - heavy CDR2
GRIIPILGIANYA

SEQ ID NO: 530 - protein, 13 aa, Artificial Sequence
  Synthesized molecular recognition unit - heavy CDR2
GRIIPILGSANYA

SEQ ID NO: 531 - protein, 13 aa, Artificial Sequence
  Synthesized molecular recognition unit - heavy CDR2
GRIIPILGTPNYA

SEQ ID NO: 532 - protein, 13 aa, Artificial Sequence
  Synthesized molecular recognition unit - heavy CDR2
GRIIPLFGTTNYA

SEQ ID NO: 533 - protein, 13 aa, Artificial Sequence
  Synthesized molecular recognition unit - heavy CDR2
GRIIPTVGTANYA

SEQ ID NO: 534 - protein, 13 aa, Artificial Sequence
  Synthesized molecular recognition unit - heavy CDR2
GRIIPVLGTANYA

SEQ ID NO: 535 - protein, 15 aa, Artificial Sequence
  Synthesized molecular recognition unit - heavy CDR2
GRIKSKANGGTTDYA

SEQ ID NO: 536 - protein, 15 aa, Artificial Sequence
  Synthesized molecular recognition unit - heavy CDR2
GRIKSKAYGGTTEYA

SEQ ID NO: 537 - protein, 13 aa, Artificial Sequence
  Synthesized molecular recognition unit - heavy CDR2
GRINPNSGGTNYA

SEQ ID NO: 538 - protein, 13 aa, Artificial Sequence
  Synthesized molecular recognition unit - heavy CDR2
GRISAYNGYKSYA

SEQ ID NO: 539 - protein, 13 aa, Artificial Sequence
  Synthesized molecular recognition unit - heavy CDR2
GRITPVVGVTNYA

SEQ ID NO: 540 - protein, 13 aa, Artificial Sequence
  Synthesized molecular recognition unit - heavy CDR2
GRIVPAIGFTQYA

SEQ ID NO: 541 - protein, 13 aa, Artificial Sequence
  Synthesized molecular recognition unit - heavy CDR2
GRIVPIVDVVKYA

SEQ ID NO: 542 - protein, 14 aa, Artificial Sequence
  Synthesized molecular recognition unit - heavy CDR2
GRTYYRSKWYNDYA

SEQ ID NO: 543 - protein, 14 aa, Artificial Sequence
  Synthesized molecular recognition unit - heavy CDR2
GRTYYRSKWYSDYA

SEQ ID NO: 544 - protein, 14 aa, Artificial Sequence
  Synthesized molecular recognition unit - heavy CDR2
GRTYYRSKYYNGYA

SEQ ID NO: 545 - protein, 13 aa, Artificial Sequence
  Synthesized molecular recognition unit - heavy CDR2
GRVIPILGVTNYA

SEQ ID NO: 546 - protein, 12 aa, Artificial Sequence
  Synthesized molecular recognition unit - heavy CDR2
GSIYFTGGTYYN

SEQ ID NO: 547 - protein, 12 aa, Artificial Sequence
  Synthesized molecular recognition unit - heavy CDR2
GSIYHSGSTYYN

SEQ ID NO: 548 - protein, 12 aa, Artificial Sequence
  Synthesized molecular recognition unit - heavy CDR2
GSIYYTGNTYYN

SEQ ID NO: 549 - protein, 13 aa, Artificial Sequence
  Synthesized molecular recognition unit - heavy CDR2
GTVTPILGTANYA

SEQ ID NO: 550 - protein, 13 aa, Artificial Sequence
  Synthesized molecular recognition unit - heavy CDR2
GVIDPSTGGTNYA

SEQ ID NO: 551 - protein, 13 aa, Artificial Sequence
  Synthesized molecular recognition unit - heavy CDR2
GVIFPVYPTPDYA

SEQ ID NO: 552 - protein, 13 aa, Artificial Sequence
  Synthesized molecular recognition unit - heavy CDR2
GVINPGSGGTSYN

SEQ ID NO: 553 - protein, 13 aa, Artificial Sequence
  Synthesized molecular recognition unit - heavy CDR2
GVISKDGDNKYYA

SEQ ID NO: 554 - protein, 13 aa, Artificial Sequence
  Synthesized molecular recognition unit - heavy CDR2
GWIGPHNGNTNYA

SEQ ID NO: 555 - protein, 13 aa, Artificial Sequence
  Synthesized molecular recognition unit - heavy CDR2
GWINADTGDTAYS

SEQ ID NO: 556 - protein, 13 aa, Artificial Sequence
  Synthesized molecular recognition unit - heavy CDR2
GWINAGNGNTKYA

SEQ ID NO: 557 - protein, 13 aa, Artificial Sequence
  Synthesized molecular recognition unit - heavy CDR2
GWINAGNGNTKYS

SEQ ID NO: 558 - protein, 13 aa, Artificial Sequence
  Synthesized molecular recognition unit - heavy CDR2
GWINAGNGNTTYA

SEQ ID NO: 559 - protein, 13 aa, Artificial Sequence
  Synthesized molecular recognition unit - heavy CDR2
GWINAKSGGTFYA

SEQ ID NO: 560 - protein, 13 aa, Artificial Sequence
  Synthesized molecular recognition unit - heavy CDR2
GWINPKSGGTNYA

SEQ ID NO: 561 - protein, 13 aa, Artificial Sequence
  Synthesized molecular recognition unit - heavy CDR2
GWINPNSGDTKFA

SEQ ID NO: 562 - protein, 13 aa, Artificial Sequence
  Synthesized molecular recognition unit - heavy CDR2
GWINPNSGGTIYA

SEQ ID NO: 563 - protein, 13 aa, Artificial Sequence
  Synthesized molecular recognition unit - heavy CDR2
GWINPNSGGTKYA

SEQ ID NO: 564 - protein, 13 aa, Artificial Sequence
  Synthesized molecular recognition unit - heavy CDR2
GWINPNSGGTNYA

SEQ ID NO: 565 - protein, 13 aa, Artificial Sequence
  Synthesized molecular recognition unit - heavy CDR2
GWINSGNGNTKYS

SEQ ID NO: 566 - protein, 13 aa, Artificial Sequence
  Synthesized molecular recognition unit - heavy CDR2
GWINTYNGNTIYA

SEQ ID NO: 567 - protein, 13 aa, Artificial Sequence
  Synthesized molecular recognition unit - heavy CDR2
GWINTYNGNTNYP

SEQ ID NO: 568 - protein, 13 aa, Artificial Sequence
  Synthesized molecular recognition unit - heavy CDR2
GWISAYNGDTKYA

SEQ ID NO: 569 - protein, 13 aa, Artificial Sequence
  Synthesized molecular recognition unit - heavy CDR2
GWISAYNGHTNYA

SEQ ID NO: 570 - protein, 13 aa, Artificial Sequence
  Synthesized molecular recognition unit - heavy CDR2
GWISAYNGNTNYA

SEQ ID NO: 571 - protein, 13 aa, Artificial Sequence
  Synthesized molecular recognition unit - heavy CDR2
GWISPNRGGTNYA

SEQ ID NO: 572 - protein, 13 aa, Artificial Sequence
  Synthesized molecular recognition unit - heavy CDR2
GWISPYNGNTKYA

SEQ ID NO: 573 - protein, 13 aa, Artificial Sequence
  Synthesized molecular recognition unit - heavy CDR2
GWISPYNGNTNYA

SEQ ID NO: 574 - protein, 13 aa, Artificial Sequence
  Synthesized molecular recognition unit - heavy CDR2
GWISPYNGYTKYA

SEQ ID NO: 575 - protein, 13 aa, Artificial Sequence
  Synthesized molecular recognition unit - heavy CDR2
GWISSFNGNTKYA

SEQ ID NO: 576 - protein, 13 aa, Artificial Sequence
  Synthesized molecular recognition unit - heavy CDR2
GWISTFNDNTNYA

SEQ ID NO: 577 - protein, 13 aa, Artificial Sequence
  Synthesized molecular recognition unit - heavy CDR2
GWISTYNGATNYA

SEQ ID NO: 578 - protein, 13 aa, Artificial Sequence
  Synthesized molecular recognition unit - heavy CDR2
GWIYPNSGGTKYA

SEQ ID NO: 579 - protein, 13 aa, Artificial Sequence
  Synthesized molecular recognition unit - heavy CDR2
GWMNPDSGKTGYA

SEQ ID NO: 580 - protein, 13 aa, Artificial Sequence
  Synthesized molecular recognition unit - heavy CDR2
GWMNPISGNTGYA

SEQ ID NO: 581 - protein, 13 aa, Artificial Sequence
  Synthesized molecular recognition unit - heavy CDR2
GWMNPNNGNTTYA

SEQ ID NO: 582 - protein, 13 aa, Artificial Sequence
  Synthesized molecular recognition unit - heavy CDR2
GWMNPNSGNTAYA

SEQ ID NO: 583 - protein, 13 aa, Artificial Sequence
  Synthesized molecular recognition unit - heavy CDR2
GWMNPNSGNTGYA

SEQ ID NO: 584 - protein, 13 aa, Artificial Sequence
  Synthesized molecular recognition unit - heavy CDR2
GWMSPNSGNAGFA

SEQ ID NO: 585 - protein, 13 aa, Artificial Sequence
  Synthesized molecular recognition unit - heavy CDR2
GWMSPSSGNAGYA

SEQ ID NO: 586 - protein, 13 aa, Artificial Sequence
  Synthesized molecular recognition unit - heavy CDR2
GWVNPTTGNTGYA

SEQ ID NO: 587 - protein, 13 aa, Artificial Sequence
  Synthesized molecular recognition unit - heavy CDR2
GWVSPNTGNTVYA

SEQ ID NO: 588 - protein, 13 aa, Artificial Sequence
  Synthesized molecular recognition unit - heavy CDR2
GWVSPSSGNTAYA

SEQ ID NO: 589 - protein, 12 aa, Artificial Sequence
  Synthesized molecular recognition unit - heavy CDR2
GYIYYSGSTYYN

SEQ ID NO: 590 - protein, 12 aa, Artificial Sequence
  Synthesized molecular recognition unit - heavy CDR2
PRIPSDSTTFYA

SEQ ID NO: 591 - protein, 12 aa, Artificial Sequence
  Synthesized molecular recognition unit - heavy CDR2
SAIDGAGRTYYT

SEQ ID NO: 592 - protein, 13 aa, Artificial Sequence
  Synthesized molecular recognition unit - heavy CDR2
SAIDGSGGSTYYA

SEQ ID NO: 593 - protein, 12 aa, Artificial Sequence
  Synthesized molecular recognition unit - heavy CDR2
SAIGAGGGTYYA

SEQ ID NO: 594 - protein, 12 aa, Artificial Sequence
  Synthesized molecular recognition unit - heavy CDR2
SAIGTGGDTYYA

SEQ ID NO: 595 - protein, 12 aa, Artificial Sequence
  Synthesized molecular recognition unit - heavy CDR2
SAIGTGGGTYYA

SEQ ID NO: 596 - protein, 13 aa, Artificial Sequence
  Synthesized molecular recognition unit - heavy CDR2
SAISASGDSTFYA

SEQ ID NO: 597 - protein, 13 aa, Artificial Sequence
  Synthesized molecular recognition unit - heavy CDR2
SAISGDGALTYYA

SEQ ID NO: 598 - protein, 13 aa, Artificial Sequence
  Synthesized molecular recognition unit - heavy CDR2
SAISGSGATTTYA

SEQ ID NO: 599 - protein, 12 aa, Artificial Sequence
  Synthesized molecular recognition unit - heavy CDR2
SAISGSGFTYYA

SEQ ID NO: 600 - protein, 13 aa, Artificial Sequence
  Synthesized molecular recognition unit - heavy CDR2
SAISGSGGSTYYA

SEQ ID NO: 601 - protein, 13 aa, Artificial Sequence
  Synthesized molecular recognition unit - heavy CDR2
SAISNSGGSTYYA

SEQ ID NO: 602 - protein, 13 aa, Artificial Sequence
  Synthesized molecular recognition unit - heavy CDR2
SAISVSGGTTFYA

SEQ ID NO: 603 - protein, 13 aa, Artificial Sequence
  Synthesized molecular recognition unit - heavy CDR2
SAISWSGGSTYYA

SEQ ID NO: 604 - protein, 13 aa, Artificial Sequence
  Synthesized molecular recognition unit - heavy CDR2
SAVSGNGGGTFYA

SEQ ID NO: 605 - protein, 12 aa, Artificial Sequence
  Synthesized molecular recognition unit - heavy CDR2
SGIGVGGGTYYA

SEQ ID NO: 606 - protein, 13 aa, Artificial Sequence
  Synthesized molecular recognition unit - heavy CDR2
SGINWNGGSTGYA

SEQ ID NO: 607 - protein, 13 aa, Artificial Sequence
  Synthesized molecular recognition unit - heavy CDR2
SGINWNSAKIGYV

SEQ ID NO: 608 - protein, 13 aa, Artificial Sequence
  Synthesized molecular recognition unit - heavy CDR2
SGISGSGGSTYYA

SEQ ID NO: 609 - protein, 13 aa, Artificial Sequence
  Synthesized molecular recognition unit - heavy CDR2
SGISGSGGTTYYA

SEQ ID NO: 610 - protein, 13 aa, Artificial Sequence
  Synthesized molecular recognition unit - heavy CDR2
SGISGSGRSTYYA

SEQ ID NO: 611 - protein, 13 aa, Artificial Sequence
  Synthesized molecular recognition unit - heavy CDR2
SGISGSGSSTYYA

SEQ ID NO: 612 - protein, 13 aa, Artificial Sequence
  Synthesized molecular recognition unit - heavy CDR2
SGISGSGTTTYYR

SEQ ID NO: 613 - protein, 13 aa, Artificial Sequence
  Synthesized molecular recognition unit - heavy CDR2
SGISRDGGRTSYS

SEQ ID NO: 614 - protein, 13 aa, Artificial Sequence
  Synthesized molecular recognition unit - heavy CDR2
SGISWNSGNIGYA

SEQ ID NO: 615 - protein, 13 aa, Artificial Sequence
  Synthesized molecular recognition unit - heavy CDR2
SGISWNSGSIGYA

SEQ ID NO: 616 - protein, 13 aa, Artificial Sequence
  Synthesized molecular recognition unit - heavy CDR2
SGITGSGGRTFYA

SEQ ID NO: 617 - protein, 13 aa, Artificial Sequence
  Synthesized molecular recognition unit - heavy CDR2
SGVGGSGGSTZYA

SEQ ID NO: 618 - protein, 13 aa, Artificial Sequence
  Synthesized molecular recognition unit - heavy CDR2
SGVSWNGSRTHYV

SEQ ID NO: 619 - protein, 13 aa, Artificial Sequence
  Synthesized molecular recognition unit - heavy CDR2
SHISSGGATIDYA

SEQ ID NO: 620 - protein, 13 aa, Artificial Sequence
  Synthesized molecular recognition unit - heavy CDR2
SLISGSGDNTNYA

SEQ ID NO: 621 - protein, 13 aa, Artificial Sequence
  Synthesized molecular recognition unit - heavy CDR2
SLVSFDGSKEHYA

SEQ ID NO: 622 - protein, 13 aa, Artificial Sequence
  Synthesized molecular recognition unit - heavy CDR2
SRIDTDGSTTVYA

SEQ ID NO: 623 - protein, 13 aa, Artificial Sequence
  Synthesized molecular recognition unit - heavy CDR2
SRINGDGSNTNYA

SEQ ID NO: 624 - protein, 13 aa, Artificial Sequence
  Synthesized molecular recognition unit - heavy CDR2
SRINGDGSSTRYA

SEQ ID NO: 625 - protein, 13 aa, Artificial Sequence
  Synthesized molecular recognition unit - heavy CDR2
SRINSDGSTISYA

SEQ ID NO: 626 - protein, 13 aa, Artificial Sequence
  Synthesized molecular recognition unit - heavy CDR2
SRINYDGSATTYA

SEQ ID NO: 627 - protein, 13 aa, Artificial Sequence
  Synthesized molecular recognition unit - heavy CDR2
SRISNSGSLVYYA

SEQ ID NO: 628 - protein, 13 aa, Artificial Sequence
  Synthesized molecular recognition unit - heavy CDR2
SRISPDGRTTTYA

SEQ ID NO: 629 - protein, 13 aa, Artificial Sequence
  Synthesized molecular recognition unit - heavy CDR2
SSIDGNGDHVFYA

SEQ ID NO: 630 - protein, 13 aa, Artificial Sequence
  Synthesized molecular recognition unit - heavy CDR2
SSINNSSRTVFYA

SEQ ID NO: 631 - protein, 13 aa, Artificial Sequence
  Synthesized molecular recognition unit - heavy CDR2
SSISAAGAYKYYA

SEQ ID NO: 632 - protein, 13 aa, Artificial Sequence
  Synthesized molecular recognition unit - heavy CDR2
SSISGGGRHTYYA

SEQ ID NO: 633 - protein, 13 aa, Artificial Sequence
  Synthesized molecular recognition unit - heavy CDR2
SSISGLGGSTYZA

SEQ ID NO: 634 - protein, 13 aa, Artificial Sequence
  Synthesized molecular recognition unit - heavy CDR2
SSISSGNSYIYYA

SEQ ID NO: 635 - protein, 13 aa, Artificial Sequence
  Synthesized molecular recognition unit - heavy CDR2
SSISSSSHYKYYA

SEQ ID NO: 636 - protein, 13 aa, Artificial Sequence
  Synthesized molecular recognition unit - heavy CDR2
SSISSSSSYIYYA

SEQ ID NO: 637 - protein, 13 aa, Artificial Sequence
  Synthesized molecular recognition unit - heavy CDR2
SSISTSGGSTYYA

SEQ ID NO: 638 - protein, 13 aa, Artificial Sequence
  Synthesized molecular recognition unit - heavy CDR2
SSISWNSGRVDYA

SEQ ID NO: 639 - protein, 15 aa, Artificial Sequence
  Synthesized molecular recognition unit - heavy CDR2
SSITRTPSGGTTEYA

SEQ ID NO: 640 - protein, 11 aa, Artificial Sequence
  Synthesized molecular recognition unit - heavy CDR2
SSITTTSTLYA

SEQ ID NO: 641 - protein, 13 aa, Artificial Sequence
  Synthesized molecular recognition unit - heavy CDR2
SSLSWNSGTIVYA

SEQ ID NO: 642 - protein, 13 aa, Artificial Sequence
  Synthesized molecular recognition unit - heavy CDR2
SSTSGSGGNSKYS

SEQ ID NO: 643 - protein, 13 aa, Artificial Sequence
  Synthesized molecular recognition unit - heavy CDR2
STIAGSGGRTYYS

SEQ ID NO: 644 - protein, 12 aa, Artificial Sequence
  Synthesized molecular recognition unit - heavy CDR2
STIGPAGDTYYP

SEQ ID NO: 645 - protein, 12 aa, Artificial Sequence
  Synthesized molecular recognition unit - heavy CDR2
STIGTGGGTYYA

SEQ ID NO: 646 - protein, 13 aa, Artificial Sequence
  Synthesized molecular recognition unit - heavy CDR2
STISGGGGSTYYA

SEQ ID NO: 647 - protein, 13 aa, Artificial Sequence
  Synthesized molecular recognition unit - heavy CDR2
STISGSGGSTYYS

SEQ ID NO: 648 - protein, 13 aa, Artificial Sequence
  Synthesized molecular recognition unit - heavy CDR2
STISGSGVSTFYA

SEQ ID NO: 649 - protein, 13 aa, Artificial Sequence
  Synthesized molecular recognition unit - heavy CDR2
STISPSGLYIYQA

SEQ ID NO: 650 - protein, 13 aa, Artificial Sequence
  Synthesized molecular recognition unit - heavy CDR2
STISSSGGRTFYA

SEQ ID NO: 651 - protein, 12 aa, Artificial Sequence
  Synthesized molecular recognition unit - heavy CDR2
SVISSGGSPYYA

SEQ ID NO: 652 - protein, 13 aa, Artificial Sequence
  Synthesized molecular recognition unit - heavy CDR2
SVISTSGDTVLYT

SEQ ID NO: 653 - protein, 12 aa, Artificial Sequence
  Synthesized molecular recognition unit - heavy CDR2
SVIYGGGNTNYA

SEQ ID NO: 654 - protein, 13 aa, Artificial Sequence
  Synthesized molecular recognition unit - heavy CDR2
SYIENDGSITTYA

SEQ ID NO: 655 - protein, 13 aa, Artificial Sequence
  Synthesized molecular recognition unit - heavy CDR2
SYIGTSDGTTYYA

SEQ ID NO: 656 - protein, 13 aa, Artificial Sequence
  Synthesized molecular recognition unit - heavy CDR2
SYISAGDGFTYYA

SEQ ID NO: 657 - protein, 13 aa, Artificial Sequence
  Synthesized molecular recognition unit - heavy CDR2
SYISGAGGSTEYA

SEQ ID NO: 658 - protein, 13 aa, Artificial Sequence
  Synthesized molecular recognition unit - heavy CDR2
SYISGDSGYTNYA

SEQ ID NO: 659 - protein, 13 aa, Artificial Sequence
  Synthesized molecular recognition unit - heavy CDR2
SYISSGSYTIYYS

SEQ ID NO: 660 - protein, 13 aa, Artificial Sequence
  Synthesized molecular recognition unit - heavy CDR2
SYISSSGSITHYA

SEQ ID NO: 661 - protein, 13 aa, Artificial Sequence
  Synthesized molecular recognition unit - heavy CDR2
SYISSSSSAIYYA

SEQ ID NO: 662 - protein, 13 aa, Artificial Sequence
  Synthesized molecular recognition unit - heavy CDR2
SYISSSSSTIYYA

SEQ ID NO: 663 - protein, 13 aa, Artificial Sequence
  Synthesized molecular recognition unit - heavy CDR2
SYISTSDGSTYYA

SEQ ID NO: 664 - protein, 13 aa, Artificial Sequence
  Synthesized molecular recognition unit - heavy CDR2
SYSSGNSGYTNYA

SEQ ID NO: 665 - protein, 13 aa, Artificial Sequence
  Synthesized molecular recognition unit - heavy CDR2
TVISGSGGSTYYA

SEQ ID NO: 666 - protein, 13 aa, Artificial Sequence
  Synthesized molecular recognition unit - heavy CDR2
TVISGSGGSTYYS

SEQ ID NO: 667 - protein, 17 aa, Artificial Sequence
  Synthesized molecular recognition unit - heavy CDR2
VISGDGSYTYYADSVKG

SEQ ID NO: 668-677 - skipped (10 entries)

SEQ ID NO: 678 - protein, 15 aa, Artificial Sequence
  Synthesized molecular recognition unit - heavy CDR3
CAAASSLTSTPYDLW

SEQ ID NO: 679 - protein, 23 aa, Artificial Sequence
  Synthesized molecular recognition unit - heavy CDR3
CAADRSPYYYDSSGYYPDAFDIW

SEQ ID NO: 680 - protein, 18 aa, Artificial Sequence
  Synthesized molecular recognition unit - heavy CDR3
CAAGFPTVFVVDGEYDYW

SEQ ID NO: 681 - protein, 17 aa, Artificial Sequence
  Synthesized molecular recognition unit - heavy CDR3
CAAGPIARWYRGDMDYW

SEQ ID NO: 682 - protein, 19 aa, Artificial Sequence
  Synthesized molecular recognition unit - heavy CDR3
CAAGPNYSWFMPSSSRLIW

SEQ ID NO: 683 - protein, 12 aa, Artificial Sequence
  Synthesized molecular recognition unit - heavy CDR3
CAAGPTLPFRYW

SEQ ID NO: 684 - protein, 12 aa, Artificial Sequence
  Synthesized molecular recognition unit - heavy CDR3
CAAGVTGSWRYW

SEQ ID NO: 685 - protein, 15 aa, Artificial Sequence
  Synthesized molecular recognition unit - heavy CDR3
CAAPDVVVTADGYYW

SEQ ID NO: 686 - protein, 7 aa, Artificial Sequence
  Synthesized molecular recognition unit - heavy CDR3
CAAPDYW

SEQ ID NO: 687 - protein, 22 aa, Artificial Sequence
  Synthesized molecular recognition unit - heavy CDR3
CAAPQSPNMYIRTDQLWWYKYW

SEQ ID NO: 688 - protein, 22 aa, Artificial Sequence
  Synthesized molecular recognition unit - heavy CDR3
CAAQKPYYNGHFYADDKHYDHW

SEQ ID NO: 689 - protein, 19 aa, Artificial Sequence
  Synthesized molecular recognition unit - heavy CDR3
CAAVFLSRNYEIQEYYRYQ

SEQ ID NO: 690 - protein, 10 aa, Artificial Sequence
  Synthesized molecular recognition unit - heavy CDR3
CADGSGTSHR

SEQ ID NO: 691 - protein, 11 aa, Artificial Sequence
  Synthesized molecular recognition unit - heavy CDR3
CAESLTSTADW

SEQ ID NO: 692 - protein, 9 aa, Artificial Sequence
  Synthesized molecular recognition unit - heavy CDR3
CAGGEVYEL

SEQ ID NO: 693 - protein, 15 aa, Artificial Sequence
  Synthesized molecular recognition unit - heavy CDR3
CAHSDFFSGLSFGDW

SEQ ID NO: 694 - protein, 9 aa, Artificial Sequence
  Synthesized molecular recognition unit - heavy CDR3
CAIRAFDIW

SEQ ID NO: 695 - protein, 15 aa, Artificial Sequence
  Synthesized molecular recognition unit - heavy CDR3
CAKAGDWGLYGMDVW

SEQ ID NO: 696 - protein, 10 aa, Artificial Sequence
  Synthesized molecular recognition unit - heavy CDR3
CAKAGQQLDW

SEQ ID NO: 697 - protein, 16 aa, Artificial Sequence
  Synthesized molecular recognition unit - heavy CDR3
CAKASTPMVQGAPDYW

SEQ ID NO: 698 - protein, 8 aa, Artificial Sequence
  Synthesized molecular recognition unit - heavy CDR3
CAKDGVVR

SEQ ID NO: 699 - protein, 7 aa, Artificial Sequence [sequence omitted]

SEQ ID NO: 700 - protein, 14 aa, Artificial Sequence
  Synthesized molecular recognition unit - heavy CDR3
CAKDHLAVADAHGR

SEQ ID NO: 701 - protein, 16 aa, Artificial Sequence
  Synthesized molecular recognition unit - heavy CDR3
CAKDIGSSWYYYMDVW

SEQ ID NO: 702 - protein, 17 aa, Artificial Sequence
  Synthesized molecular recognition unit - heavy CDR3
CAKDITPYGDYSILSHW

SEQ ID NO: 703 - protein, 17 aa, Artificial Sequence
  Synthesized molecular recognition unit - heavy CDR3
CAKDKVPYSYGPNFDYW

SEQ ID NO: 704 - protein, 16 aa, Artificial Sequence
  Synthesized molecular recognition unit - heavy CDR3
CAKDLVPWGSSAFNIW

SEQ ID NO: 705 - protein, 19 aa, Artificial Sequence
  Synthesized molecular recognition unit - heavy CDR3
CAKDLVPYCSGGSCPPSGW

SEQ ID NO: 706 - protein, 12 aa, Artificial Sequence
  Synthesized molecular recognition unit - heavy CDR3
CAKDNGWYFDLW

SEQ ID NO: 707 - protein, 15 aa, Artificial Sequence
  Synthesized molecular recognition unit - heavy CDR3
CAKDRGNYGDYLDYW

SEQ ID NO: 708 - protein, 16 aa, Artificial Sequence
  Synthesized molecular recognition unit - heavy CDR3
CAKDRGYSSGWYLDYW

SEQ ID NO: 709 - protein, 25 aa, Artificial Sequence
  Synthesized molecular recognition unit - heavy CDR3
CAKDSIGRRGRGAPQPYYYYGMDVW

SEQ ID NO: 710 - protein, 8 aa, Artificial Sequence
  Synthesized molecular recognition unit - heavy CDR3
CAKDVNYW

SEQ ID NO: 711 - protein, 16 aa, Artificial Sequence
  Synthesized molecular recognition unit - heavy CDR3
CAKGAGYGSGSWQAAW

SEQ ID NO: 712 - protein, 12 aa, Artificial Sequence
  Synthesized molecular recognition unit - heavy CDR3
CAKGDYGALDYW

SEQ ID NO: 713 - protein, 14 aa, Artificial Sequence
  Synthesized molecular recognition unit - heavy CDR3
CAKGGQWLYGMDVW

SEQ ID NO: 714 - protein, 16 aa, Artificial Sequence
  Synthesized molecular recognition unit - heavy CDR3
CAKGGRDGYKGYFDYW

SEQ ID NO: 715 - protein, 13 aa, Artificial Sequence
  Synthesized molecular recognition unit - heavy CDR3
CAKGGWRSSFDPW

SEQ ID NO: 716 - protein, 11 aa, Artificial Sequence
  Synthesized molecular recognition unit - heavy CDR3
CAKGIRWFDPW

SEQ ID NO: 717 - protein, 15 aa, Artificial Sequence
  Synthesized molecular recognition unit - heavy CDR3
CAKGIVGDYGAFDIW

SEQ ID NO: 718 - protein, 12 aa, Artificial Sequence
  Synthesized molecular recognition unit - heavy CDR3
CAKGLWGPLLNW

SEQ ID NO: 719 - protein, 11 aa, Artificial Sequence
  Synthesized molecular recognition unit - heavy CDR3
CAKGNWAFDIW

SEQ ID NO: 720 - protein, 16 aa, Artificial Sequence
  Synthesized molecular recognition unit - heavy CDR3
CAKGSLLLGYYGMDVW

SEQ ID NO: 721 - protein, 18 aa, Artificial Sequence
  Synthesized molecular recognition unit - heavy CDR3
CAKGSVFGLKAGGYADYW

SEQ ID NO: 722 - protein, 21 aa, Artificial Sequence
  Synthesized molecular recognition unit - heavy CDR3
CAKGSYYYDNSGYYWDAFDIW

SEQ ID NO: 723 - protein, 21 aa, Artificial Sequence
  Synthesized molecular recognition unit - heavy CDR3
CAKGSYYYDSSGYYWDAFDIW

SEQ ID NO: 724 - protein, 16 aa, Artificial Sequence
  Synthesized molecular recognition unit - heavy CDR3
CAKLGGSSWLREYDYW

SEQ ID NO: 725 - protein, 18 aa, Artificial Sequence
  Synthesized molecular recognition unit - heavy CDR3
CAKPGIAAAGTNNWFDPW

SEQ ID NO: 726 - protein, 13 aa, Artificial Sequence
  Synthesized molecular recognition unit - heavy CDR3
CAKTGRGYAFDIW

SEQ ID NO: 727 - protein, 9 aa, Artificial Sequence
  Synthesized molecular recognition unit - heavy CDR3
CAKTKLPIW

SEQ ID NO: 728 - protein, 14 aa, Artificial Sequence
  Synthesized molecular recognition unit - heavy CDR3
CAKTLVTSHALHIW

SEQ ID NO: 729 - protein, 16 aa, Artificial Sequence
  Synthesized molecular recognition unit - heavy CDR3
CAKWHIGATGNWFDPW

SEQ ID NO: 730 - protein, 22 aa, Artificial Sequence
  Synthesized molecular recognition unit - heavy CDR3
CALLVGAARGISYYYYYGMDVW

SEQ ID NO: 731 - protein, 14 aa, Artificial Sequence
  Synthesized molecular recognition unit - heavy CDR3
CALSSSWYGGFDYW

SEQ ID NO: 732 - protein, 11 aa, Artificial Sequence
  Synthesized molecular recognition unit - heavy CDR3
CANGSYAQHLW

SEQ ID NO: 733 - protein, 12 aa, Artificial Sequence
  Synthesized molecular recognition unit - heavy CDR3
CAPNESGNVDYW

SEQ ID NO: 734 - protein, 17 aa, Artificial Sequence
  Synthesized molecular recognition unit - heavy CDR3
CAPRVLVTAPSGGMDYW

SEQ ID NO: 735 - protein, 7 aa, Artificial Sequence
  Synthesized molecular recognition unit - heavy CDR3
CAQGTYW

SEQ ID NO: 736 - protein, 14 aa, Artificial Sequence
  Synthesized molecular recognition unit - heavy CDR3
CARAAAGSYGGGYW

SEQ ID NO: 737 - protein, 20 aa, Artificial Sequence
  Synthesized molecular recognition unit - heavy CDR3
CARAALGYCTGGVCPPVDYW

SEQ ID NO: 738 - protein, 20 aa, Artificial Sequence
  Synthesized molecular recognition unit - heavy CDR3
CARADDYYDSSGYYYGFDYW

SEQ ID NO: 739 - protein, 11 aa, Artificial Sequence
  Synthesized molecular recognition unit - heavy CDR3
CARAGDSPDYW

SEQ ID NO: 740 - protein, 14 aa, Artificial Sequence
  Synthesized molecular recognition unit - heavy CDR3
CARAGSGYYNFDYW

SEQ ID NO: 741 - protein, 14 aa, Artificial Sequence
  Synthesized molecular recognition unit - heavy CDR3
CARAGVATIAFDYW

SEQ ID NO: 742 - protein, 12 aa, Artificial Sequence
  Synthesized molecular recognition unit - heavy CDR3
CARAIPGDYDYW

SEQ ID NO: 743 - protein, 20 aa, Artificial Sequence
  Synthesized molecular recognition unit - heavy CDR3
CARAIVGATGLNRFKAFDIW

SEQ ID NO: 744 - protein, 18 aa, Artificial Sequence
  Synthesized molecular recognition unit - heavy CDR3
CARAKGSGWYVGSAFDIW

SEQ ID NO: 745 - protein, 17 aa, Artificial Sequence
  Synthesized molecular recognition unit - heavy CDR3
CARAMWSYGQQNAFDIW

SEQ ID NO: 746 - protein, 16 aa, Artificial Sequence
  Synthesized molecular recognition unit - heavy CDR3
CARAPLDGSGSYYVDW

SEQ ID NO: 747 - protein, 15 aa, Artificial Sequence
  Synthesized molecular recognition unit - heavy CDR3
CARAPSYSSGWYVRW

SEQ ID NO: 748 - protein, 19 aa, Artificial Sequence
  Synthesized molecular recognition unit - heavy CDR3
CARAPYYYGSGSLFRLDYW

SEQ ID NO: 749 - protein, 13 aa, Artificial Sequence
  Synthesized molecular recognition unit - heavy CDR3
CARARGGDSPLSL

SEQ ID NO: 750 - protein, 19 aa, Artificial Sequence
  Synthesized molecular recognition unit - heavy CDR3
CARARLLGGYYTPDRMDVW

SEQ ID NO: 751 - protein, 16 aa, Artificial Sequence
  Synthesized molecular recognition unit - heavy CDR3
CARARSSGWTDAFDIW

SEQ ID NO: 752 - protein, 16 aa, Artificial Sequence
  Synthesized molecular recognition unit - heavy CDR3
CARASAWTPYGAFDIW

SEQ ID NO: 753 - protein, 23 aa, Artificial Sequence
  Synthesized molecular recognition unit - heavy CDR3
CARASLYYDYVWGSYRHYYFDYW

SEQ ID NO: 754 - protein, 17 aa, Artificial Sequence
  Synthesized molecular recognition unit - heavy CDR3
CARASRIDGGWPIIDHL

SEQ ID NO: 755 - protein, 18 aa, Artificial Sequence
  Synthesized molecular recognition unit - heavy CDR3
CARASSWYLHYYYGMDVW

SEQ ID NO: 756 - protein, 13 aa, Artificial Sequence
  Synthesized molecular recognition unit - heavy CDR3
CARASTSGDYSLW

SEQ ID NO: 757 - protein, 15 aa, Artificial Sequence
  Synthesized molecular recognition unit - heavy CDR3
CARATGFGTVVFDYW

SEQ ID NO: 758 - protein, 17 aa, Artificial Sequence
  Synthesized molecular recognition unit - heavy CDR3
CARATQELLLPYGMDVW

SEQ ID NO: 759 - protein, 26 aa, Artificial Sequence
  Synthesized molecular recognition unit - heavy CDR3
CARATSLGRRYCSSTSCYPRDAFDIW

SEQ ID NO: 760 - protein, 14 aa, Artificial Sequence
  Synthesized molecular recognition unit - heavy CDR3
CARATYGGDAFDIW

SEQ ID NO: 761 - protein, 18 aa, Artificial Sequence
  Synthesized molecular recognition unit - heavy CDR3
CARAWKGLWFGEGTFDYW

SEQ ID NO: 762 - protein, 19 aa, Artificial Sequence
  Synthesized molecular recognition unit - heavy CDR3
CARDADSSGYYRYDAFDIW

SEQ ID NO: 763 - protein, 12 aa, Artificial Sequence
  Synthesized molecular recognition unit - heavy CDR3
CARDAYNWFDPR

SEQ ID NO: 764 - protein, 12 aa, Artificial Sequence
  Synthesized molecular recognition unit - heavy CDR3
CARDAYNWFDPW

SEQ ID NO: 765 - protein, 17 aa, Artificial Sequence
  Synthesized molecular recognition unit - heavy CDR3
CARDCSGGSCYSHFDYW

SEQ ID NO: 766 - protein, 17 aa, Artificial Sequence
  Synthesized molecular recognition unit - heavy CDR3
CARDEGAGYYYYYMDVW

SEQ ID NO: 767 - protein, 13 aa, Artificial Sequence
  Synthesized molecular recognition unit - heavy CDR3
CARDGGDYGMDVW

SEQ ID NO: 768 - protein, 8 aa, Artificial Sequence [sequence omitted]

SEQ ID NO: 769 - protein, 13 aa, Artificial Sequence
  Synthesized molecular recognition unit - heavy CDR3
CARDGIWDIFDYW

SEQ ID NO: 770 - protein, 18 aa, Artificial Sequence
  Synthesized molecular recognition unit - heavy CDR3
CARDGSSGWYSPNAFDIW

SEQ ID NO: 771 - protein, 7 aa, Artificial Sequence
  Synthesized molecular recognition unit - heavy CDR3
CARDGSW

SEQ ID NO: 772 - protein, 17 aa, Artificial Sequence
  Synthesized molecular recognition unit - heavy CDR3
CARDGTPFYSGSYYGSW

SEQ ID NO: 773 - protein, 7 aa, Artificial Sequence
  Synthesized molecular recognition unit - heavy CDR3
CARDGVE

SEQ ID NO: 774 - protein, 19 aa, Artificial Sequence
  Synthesized molecular recognition unit - heavy CDR3
CARDHGSSWYQNTDAFDIW

SEQ ID NO: 775 - protein, 14 aa, Artificial Sequence
  Synthesized molecular recognition unit - heavy CDR3
CARDITGADGMDVW

SEQ ID NO: 776 - protein, 12 aa, Artificial Sequence
  Synthesized molecular recognition unit - heavy CDR3
CARDLDSGFDLW

SEQ ID NO: 777 - protein, 15 aa, Artificial Sequence
  Synthesized molecular recognition unit - heavy CDR3
CARDLMVGRNKLDYW

SEQ ID NO: 778 - protein, 20 aa, Artificial Sequence
  Synthesized molecular recognition unit - heavy CDR3
CARDLRFYSSSWRRVGMDVW

SEQ ID NO: 779 - protein, 19 aa, Artificial Sequence
  Synthesized molecular recognition unit - heavy CDR3
CARDLSPMVRGVISGMDVW

SEQ ID NO: 780 - protein, 18 aa, Artificial Sequence
  Synthesized molecular recognition unit - heavy CDR3
CARDLTPFTQQQLVLGLL

SEQ ID NO: 781 - protein, 23 aa, Artificial Sequence
  Synthesized molecular recognition unit - heavy CDR3
CARDLTYYYDSSGHSPLGAFDIW

SEQ ID NO: 782 - protein, 16 aa, Artificial Sequence
  Synthesized molecular recognition unit - heavy CDR3
CARDLVAARPSNWDYW

SEQ ID NO: 783 - protein, 23 aa, Artificial Sequence
  Synthesized molecular recognition unit - heavy CDR3
CARDNGYCSGGSCYATYYGMDVR

SEQ ID NO: 784 - protein, 18 aa, Artificial Sequence
  Synthesized molecular recognition unit - heavy CDR3
CARDPIMFGDQPGWFDPW

SEQ ID NO: 785 - protein, 15 aa, Artificial Sequence
  Synthesized molecular recognition unit - heavy CDR3
CARDQNDSWYRSDYW

SEQ ID NO: 786 - protein, 22 aa, Artificial Sequence
  Synthesized molecular recognition unit - heavy CDR3
CARDRDIVVVPAQRGEGGFDPW

SEQ ID NO: 787 - protein, 8 aa, Artificial Sequence [sequence omitted]

SEQ ID NO: 788 - protein, 13 aa, Artificial Sequence
  Synthesized molecular recognition unit - heavy CDR3
CARDRFDNWFDPW

SEQ ID NO: 789 - protein, 11 aa, Artificial Sequence
  Synthesized molecular recognition unit - heavy CDR3
CARDRLAFDYW

SEQ ID NO: 790 - protein, 11 aa, Artificial Sequence
  Synthesized molecular recognition unit - heavy CDR3
CARDRPGFDPW

SEQ ID NO: 791 - protein, 16 aa, Artificial Sequence
  Synthesized molecular recognition unit - heavy CDR3
CARDRPSSSWYAFDYW

SEQ ID NO: 792 - protein, 16 aa, Artificial Sequence
  Synthesized molecular recognition unit - heavy CDR3
CARDRPTSSWYAFDYW

SEQ ID NO: 793 - protein, 19 aa, Artificial Sequence
  Synthesized molecular recognition unit - heavy CDR3
CARDRPYSSGWYYPAFDIW

SEQ ID NO: 794 - protein, 17 aa, Artificial Sequence
  Synthesized molecular recognition unit - heavy CDR3
CARDRQLGWAHWYFDLW

SEQ ID NO: 795 - protein, 13 aa, Artificial Sequence
  Synthesized molecular recognition unit - heavy CDR3
CARDRRGYGMDVW

SEQ ID NO: 796 - protein, 22 aa, Artificial Sequence
  Synthesized molecular recognition unit - heavy CDR3
CARDRVTLRGGYSYGTDAFDIW

SEQ ID NO: 797 - protein, 16 aa, Artificial Sequence
  Synthesized molecular recognition unit - heavy CDR3
CARDSDFWYYYGMDVW

SEQ ID NO: 798 - protein, 19 aa, Artificial Sequence
  Synthesized molecular recognition unit - heavy CDR3
CARDSSSGWYASYYGMDVW

SEQ ID NO: 799 - protein, 19 aa, Artificial Sequence
  Synthesized molecular recognition unit - heavy CDR3
CARDSSSWYSYYYYYMDVW

SEQ ID NO: 800 - protein, 13 aa, Artificial Sequence
  Synthesized molecular recognition unit - heavy CDR3
CARDSYPYGMDVW

SEQ ID NO: 801 - protein, 16 aa, Artificial Sequence
  Synthesized molecular recognition unit - heavy CDR3
CARDTCSSTSCSPDYW

SEQ ID NO: 802 - protein, 16 aa, Artificial Sequence
  Synthesized molecular recognition unit - heavy CDR3
CARDVCSGGSCSPDVW

SEQ ID NO: 803 - protein, 9 aa, Artificial Sequence
  Synthesized molecular recognition unit - heavy CDR3
CARDVMDVW

SEQ ID NO: 804 - protein, 20 aa, Artificial Sequence
  Synthesized molecular recognition unit - heavy CDR3
CARDVPKLVTRGVAYGMDVW

SEQ ID NO: 805 - protein, 15 aa, Artificial Sequence
  Synthesized molecular recognition unit - heavy CDR3
CAREAGTTGGWFDPW

SEQ ID NO: 806 - protein, 22 aa, Artificial Sequence
  Synthesized molecular recognition unit - heavy CDR3
CAREANYDILTGYIRPDAFDIW

SEQ ID NO: 807 - protein, 14 aa, Artificial Sequence
  Synthesized molecular recognition unit - heavy CDR3
CAREEWELFGMDVW

SEQ ID NO: 808 - protein, 18 aa, Artificial Sequence
  Synthesized molecular recognition unit - heavy CDR3
CAREGRSRVYGGNSFDYW

SEQ ID NO: 809 - protein, 15 aa, Artificial Sequence
  Synthesized molecular recognition unit - heavy CDR3
CAREGSYYDWYFDLW

SEQ ID NO: 810 - protein, 17 aa, Artificial Sequence
  Synthesized molecular recognition unit - heavy CDR3
CAREGWFGESPFGMDVW

SEQ ID NO: 811 - protein, 18 aa, Artificial Sequence
  Synthesized molecular recognition unit - heavy CDR3
CAREGYDFWSGPYAFDIW

SEQ ID NO: 812 - protein, 17 aa, Artificial Sequence
  Synthesized molecular recognition unit - heavy CDR3
CARELLPMTTVTSPFIW

SEQ ID NO: 813 - protein, 15 aa, Artificial Sequence
  Synthesized molecular recognition unit - heavy CDR3
CARESVNNYYYMDVW

SEQ ID NO: 814 - protein, 15 aa, Artificial Sequence
  Synthesized molecular recognition unit - heavy CDR3
CARETTDYYYGMDVW

SEQ ID NO: 815 - protein, 12 aa, Artificial Sequence
  Synthesized molecular recognition unit - heavy CDR3
CAREYLGSFDIW

SEQ ID NO: 816 - protein, 13 aa, Artificial Sequence
  Synthesized molecular recognition unit - heavy CDR3
CARFDYFGGMDVW

SEQ ID NO: 817 - protein, 18 aa, Artificial Sequence
  Synthesized molecular recognition unit - heavy CDR3
CARFYYDILNGYSYFDYW

SEQ ID NO: 818 - protein, 18 aa, Artificial Sequence
  Synthesized molecular recognition unit - heavy CDR3
CARFYYDILTGYSYFDYW

SEQ ID NO: 819 - protein, 11 aa, Artificial Sequence
  Synthesized molecular recognition unit - heavy CDR3
CARGALGMDVW

SEQ ID NO: 820 - protein, 10 aa, Artificial Sequence [sequence omitted]

SEQ ID NO: 821 - protein, 13 aa, Artificial Sequence
  Synthesized molecular recognition unit - heavy CDR3
CARGARLYGCDYW

SEQ ID NO: 822 - protein, 13 aa, Artificial Sequence
  Synthesized molecular recognition unit - heavy CDR3
CARGARLYGFDYW

SEQ ID NO: 823 - protein, 13 aa, Artificial Sequence
  Synthesized molecular recognition unit - heavy CDR3
CARGDSGSYRDYW

SEQ ID NO: 824 - protein, 23 aa, Artificial Sequence
  Synthesized molecular recognition unit - heavy CDR3
CARGDYDFWSGYHEYYYYGMDVW

SEQ ID NO: 825 - protein, 19 aa, Artificial Sequence
  Synthesized molecular recognition unit - heavy CDR3
CARGFCSGGSCLWYGMDVW

SEQ ID NO: 826 - protein, 16 aa, Artificial Sequence
  Synthesized molecular recognition unit - heavy CDR3
CARGGAGRFGEGMDVW

SEQ ID NO: 827 - protein, 22 aa, Artificial Sequence
  Synthesized molecular recognition unit - heavy CDR3
CARGGEYSSGWTYYYYYGMDVW

SEQ ID NO: 828 - protein, 11 aa, Artificial Sequence [sequence omitted]

SEQ ID NO: 829 - protein, 11 aa, Artificial Sequence
  Synthesized molecular recognition unit - heavy CDR3
CARGGGYSSSW

SEQ ID NO: 830 - protein, 13 aa, Artificial Sequence
  Synthesized molecular recognition unit - heavy CDR3
CARGGLDGPIDYR

SEQ ID NO: 831 - protein, 11 aa, Artificial Sequence
  Synthesized molecular recognition unit - heavy CDR3
CARGGLLFDYW

SEQ ID NO: 832 - protein, 20 aa, Artificial Sequence
  Synthesized molecular recognition unit - heavy CDR3
CARGGLLRFGDGWGMGMDVW

SEQ ID NO: 833 - protein, 13 aa, Artificial Sequence
  Synthesized molecular recognition unit - heavy CDR3
CARGGNYGSGDYW

SEQ ID NO: 834 - protein, 18 aa, Artificial Sequence
  Synthesized molecular recognition unit - heavy CDR3
CARGGPIHYYYYYYMDVW

SEQ ID NO: 835 - protein, 20 aa, Artificial Sequence
  Synthesized molecular recognition unit - heavy CDR3
CARGGQGGYDWGHYHGLDVW

SEQ ID NO: 836 - protein, 13 aa, Artificial Sequence
  Synthesized molecular recognition unit - heavy CDR3
CARGGSGGNLSYW

SEQ ID NO: 837 - protein, 20 aa, Artificial Sequence
  Synthesized molecular recognition unit - heavy CDR3
CARGGSRYDFWSGHWYFDLW

SEQ ID NO: 838 - protein, 10 aa, Artificial Sequence
  Synthesized molecular recognition unit - heavy CDR3
CARGGSSDVR

SEQ ID NO: 839 - protein, 15 aa, Artificial Sequence
  Synthesized molecular recognition unit - heavy CDR3
CARGGSTGYYGMDVW

SEQ ID NO: 840 - protein, 22 aa, Artificial Sequence
  Synthesized molecular recognition unit - heavy CDR3
CARGGWRPDYYGSGSYYSFDYW

SEQ ID NO: 841 - protein, 16 aa, Artificial Sequence
  Synthesized molecular recognition unit - heavy CDR3
CARGGWTNYGGNLDYW

SEQ ID NO: 842 - protein, 15 aa, Artificial Sequence
  Synthesized molecular recognition unit - heavy CDR3
CARGGYSYGTVFDYW

SEQ ID NO: 843 - protein, 13 aa, Artificial Sequence [sequence omitted]

SEQ ID NO: 844 - protein, 16 aa, Artificial Sequence
  Synthesized molecular recognition unit - heavy CDR3
CARGKEGRYSNYEAAW

SEQ ID NO: 845 - protein, 19 aa, Artificial Sequence
  Synthesized molecular recognition unit - heavy CDR3
CARGKGYSYGYGKDWFDPW

SEQ ID NO: 846 - protein, 12 aa, Artificial Sequence
  Synthesized molecular recognition unit - heavy CDR3
CARGKSGSFDYW

SEQ ID NO: 847 - protein, 18 aa, Artificial Sequence
  Synthesized molecular recognition unit - heavy CDR3
CARGLPPAAGGGGYFQHW

SEQ ID NO: 848 - protein, 23 aa, Artificial Sequence
  Synthesized molecular recognition unit - heavy CDR3
CARGLRYFDWPQGIYYYYGMDVW

SEQ ID NO: 849 - protein, 15 aa, Artificial Sequence
  Synthesized molecular recognition unit - heavy CDR3
CARGLVIATNWFDPW

SEQ ID NO: 850 - protein, 23 aa, Artificial Sequence
  Synthesized molecular recognition unit - heavy CDR3
CARGNPTSGHIVVVPAATFSDYW

SEQ ID NO: 851 - protein, 16 aa, Artificial Sequence
  Synthesized molecular recognition unit - heavy CDR3
CARGPKTMWEDRPDYW

SEQ ID NO: 852 - protein, 18 aa, Artificial Sequence
  Synthesized molecular recognition unit - heavy CDR3
CARGPLPTKIGGHYMDVW

SEQ ID NO: 853 - protein, 19 aa, Artificial Sequence
  Synthesized molecular recognition unit - heavy CDR3
CARGPRDSGYYPGGAFDIW

SEQ ID NO: 854 - protein, 14 aa, Artificial Sequence
  Synthesized molecular recognition unit - heavy CDR3
CARGPSHQHTFDIW

SEQ ID NO: 855 - protein, 20 aa, Artificial Sequence
  Synthesized molecular recognition unit - heavy CDR3
CARGQGYSSGWYRGDAFDIW

SEQ ID NO: 856 - protein, 19 aa, Artificial Sequence
  Synthesized molecular recognition unit - heavy CDR3
CARGQSEKWWSGLYGMDVW

SEQ ID NO: 857 - protein, 19 aa, Artificial Sequence
  Synthesized molecular recognition unit - heavy CDR3
CARGRGQQWLTGYYGMDVW

SEQ ID NO: 858 - protein, 19 aa, Artificial Sequence
  Synthesized molecular recognition unit - heavy CDR3
CARGRRLVRFTVTSAFDIW

SEQ ID NO: 859 - protein, 13 aa, Artificial Sequence
  Synthesized molecular recognition unit - heavy CDR3
CARGRVWSSRDYW

SEQ ID NO: 860 - protein, 14 aa, Artificial Sequence
  Synthesized molecular recognition unit - heavy CDR3
CARGSGIAASGSYW

SEQ ID NO: 861 - protein, 17 aa, Artificial Sequence
  Synthesized molecular recognition unit - heavy CDR3
CARGSGYDFFDYGMDVW

SEQ ID NO: 862 - protein, 12 aa, Artificial Sequence
  Synthesized molecular recognition unit - heavy CDR3
CARGSSGYYVAW

SEQ ID NO: 863 - protein, 11 aa, Artificial Sequence
  Synthesized molecular recognition unit - heavy CDR3
CARGSSSWYDW

SEQ ID NO: 864 - protein, 7 aa, Artificial Sequence [sequence omitted]

SEQ ID NO: 865 - protein, 17 aa, Artificial Sequence
  Synthesized molecular recognition unit - heavy CDR3
CARGTFDWLLSPSYDYW

SEQ ID NO: 866 - protein, 19 aa, Artificial Sequence
  Synthesized molecular recognition unit - heavy CDR3
CARGTFLEWLLTNYGMDVW

SEQ ID NO: 867 - protein, 11 aa, Artificial Sequence
  Synthesized molecular recognition unit - heavy CDR3
CARGTGGFDYW

SEQ ID NO: 868 - protein, 14 aa, Artificial Sequence
  Synthesized molecular recognition unit - heavy CDR3
CARGVVGSGAFDIW

SEQ ID NO: 869 - protein, 20 aa, Artificial Sequence
  Synthesized molecular recognition unit - heavy CDR3
CARGVWTTPMGGGGNWFDPW

SEQ ID NO: 870 - protein, 24 aa, Artificial Sequence
  Synthesized molecular recognition unit - heavy CDR3
CARGVYPYSSKHKPSYYYYGMDVW

SEQ ID NO: 871 - protein, 11 aa, Artificial Sequence
  Synthesized molecular recognition unit - heavy CDR3
CARGWAGFDYW

SEQ ID NO: 872 - protein, 14 aa, Artificial Sequence
  Synthesized molecular recognition unit - heavy CDR3
CARGWTTISSLGVW

SEQ ID NO: 873 - protein, 18 aa, Artificial Sequence
  Synthesized molecular recognition unit - heavy CDR3
CARGYGDYVWGENYFDYW

SEQ ID NO: 874 - protein, 12 aa, Artificial Sequence [sequence omitted]

SEQ ID NO: 875 - protein, 17 aa, Artificial Sequence
  Synthesized molecular recognition unit - heavy CDR3
CARHAGFYGLADYFDYW

SEQ ID NO: 876 - protein, 12 aa, Artificial Sequence
  Synthesized molecular recognition unit - heavy CDR3
CARHGRIAADIW

SEQ ID NO: 877 - protein, 18 aa, Artificial Sequence
  Synthesized molecular recognition unit - heavy CDR3
CARHNPGYMGYYYGMDVW

SEQ ID NO: 878 - protein, 18 aa, Artificial Sequence
  Synthesized molecular recognition unit - heavy CDR3
CARHVYGSGTYNNWFDPW

SEQ ID NO: 879 - protein, 14 aa, Artificial Sequence
  Synthesized molecular recognition unit - heavy CDR3
CARHYYGSGNYRDW

SEQ ID NO: 880 - protein, 14 aa, Artificial Sequence [sequence omitted]

SEQ ID NO: 881 - protein, 13 aa, Artificial Sequence
  Synthesized molecular recognition unit - heavy CDR3
CARIGAGGAFDIW

SEQ ID NO: 882 - protein, 15 aa, Artificial Sequence
  Synthesized molecular recognition unit - heavy CDR3
CARIGIAVAAPVDHW

SEQ ID NO: 883 - protein, 18 aa, Artificial Sequence
  Synthesized molecular recognition unit - heavy CDR3
CARIPKPRGYSYGDNGSW

SEQ ID NO: 884 - protein, 18 aa, Artificial Sequence
  Synthesized molecular recognition unit - heavy CDR3
CARKVKGYCSGGSCYGYW

SEQ ID NO: 885 - protein, 9 aa, Artificial Sequence [sequence omitted]

SEQ ID NO: 886 - protein, 15 aa, Artificial Sequence
  Synthesized molecular recognition unit - heavy CDR3
CARLDPGYYYGMDVW

SEQ ID NO: 887 - protein, 11 aa, Artificial Sequence
  Synthesized molecular recognition unit - heavy CDR3
CARLGSTPDYW

SEQ ID NO: 888 - protein, 17 aa, Artificial Sequence
  Synthesized molecular recognition unit - heavy CDR3
CARLPRRSGKGSAFDIW

SEQ ID NO: 889 - protein, 23 aa, Artificial Sequence
  Synthesized molecular recognition unit - heavy CDR3
CARLPYYDFWSGYYGGRTGFDYW

SEQ ID NO: 890 - protein, 19 aa, Artificial Sequence
  Synthesized molecular recognition unit - heavy CDR3
CARLSVWKWEQVTNWFDPW

SEQ ID NO: 891 - protein, 21 aa, Artificial Sequence
  Synthesized molecular recognition unit - heavy CDR3
CARLSYYYDSSGPKGDAFDIW

SEQ ID NO: 892 - protein, 17 aa, Artificial Sequence
  Synthesized molecular recognition unit - heavy CDR3
CARLTGGAVAGTHRDYW

SEQ ID NO: 893 - protein, 15 aa, Artificial Sequence
  Synthesized molecular recognition unit - heavy CDR3
CARLVVRGGYGMDVW

SEQ ID NO: 894 - protein, 14 aa, Artificial Sequence
  Synthesized molecular recognition unit - heavy CDR3
CARMKDWFGAFDIW

SEQ ID NO: 895 - protein, 22 aa, Artificial Sequence
  Synthesized molecular recognition unit - heavy CDR3
CARMSSDYYDSSGYYRRGMDVW

SEQ ID NO: 896 - protein, 13 aa, Artificial Sequence
  Synthesized molecular recognition unit - heavy CDR3
CARNGIAAAEDYW

SEQ ID NO: 897 - protein, 13 aa, Artificial Sequence
  Synthesized molecular recognition unit - heavy CDR3
CARNNFLRAFDIW

SEQ ID NO: 898 - protein, 17 aa, Artificial Sequence
  Synthesized molecular recognition unit - heavy CDR3
CARNVEGATSFPEFDYW

SEQ ID NO: 899 - protein, 15 aa, Artificial Sequence
  Synthesized molecular recognition unit - heavy CDR3
CARPAGSAQNWFDPW

SEQ ID NO: 900 - protein, 14 aa, Artificial Sequence
  Synthesized molecular recognition unit - heavy CDR3
CARPIVGATAFDIW

SEQ ID NO: 901 - protein, 15 aa, Artificial Sequence
  Synthesized molecular recognition unit - heavy CDR3
CARPSTTGTKAFDIW

SEQ ID NO: 902 - protein, 14 aa, Artificial Sequence
  Synthesized molecular recognition unit - heavy CDR3
CARPSTTSFGMDVW

SEQ ID NO: 903 - protein, 14 aa, Artificial Sequence
  Synthesized molecular recognition unit - heavy CDR3
CARPYSSSRQGDYW

SEQ ID NO: 904 - protein, 19 aa, Artificial Sequence
  Synthesized molecular recognition unit - heavy CDR3
CARPYYYDSSGYDPMGDYW

SEQ ID NO: 905 - protein, 23 aa, Artificial Sequence
  Synthesized molecular recognition unit - heavy CDR3
CARQAGLHCSSTSCYLGNWFDPW

SEQ ID NO: 906 - protein, 14 aa, Artificial Sequence
  Synthesized molecular recognition unit - heavy CDR3
CARQIGWELMPDIW

SEQ ID NO: 907 - protein, 13 aa, Artificial Sequence
  Synthesized molecular recognition unit - heavy CDR3
CARQTRGGTTDGW

SEQ ID NO: 908 - protein, 19 aa, Artificial Sequence
  Synthesized molecular recognition unit - heavy CDR3
CARQYCSGGSCYPDAFDIR

SEQ ID NO: 909 - protein, 10 aa, Artificial Sequence [sequence omitted]

SEQ ID NO: 910 - protein, 18 aa, Artificial Sequence
  Synthesized molecular recognition unit - heavy CDR3
CARREPLYSSRRGAFDIW

SEQ ID NO: 911 - protein, 17 aa, Artificial Sequence
  Synthesized molecular recognition unit - heavy CDR3
CARRGYSSGWRDAFDIW

SEQ ID NO: 912 - protein, 16 aa, Artificial Sequence
  Synthesized molecular recognition unit - heavy CDR3
CARRLIAVAGAEFDPW

SEQ ID NO: 913 - protein, 20 aa, Artificial Sequence
  Synthesized molecular recognition unit - heavy CDR3
CARRSGYSGSVYYYYGMDVW

SEQ ID NO: 914 - protein, 14 aa, Artificial Sequence
  Synthesized molecular recognition unit - heavy CDR3
CARRTAVAGTIDYW

SEQ ID NO: 915 - protein, 11 aa, Artificial Sequence
  Synthesized molecular recognition unit - heavy CDR3
CARRTSASDIW

SEQ ID NO: 916 - protein, 13 aa, Artificial Sequence
  Synthesized molecular recognition unit - heavy CDR3
CARSAVAGAFDIW

SEQ ID NO: 917 - protein, 16 aa, Artificial Sequence
  Synthesized molecular recognition unit - heavy CDR3
CARSGMVKWLRSFDYW

SEQ ID NO: 918 - protein, 19 aa, Artificial Sequence
  Synthesized molecular recognition unit - heavy CDR3
CARSGPAAMVYYYYGMDVW

SEQ ID NO: 919 - protein, 15 aa, Artificial Sequence
  Synthesized molecular recognition unit - heavy CDR3
CARSGYNRRGYFDYW

SEQ ID NO: 920 - protein, 14 aa, Artificial Sequence
  Synthesized molecular recognition unit - heavy CDR3
CARSPRWYDAFDIW

SEQ ID NO: 921 - protein, 14 aa, Artificial Sequence
  Synthesized molecular recognition unit - heavy CDR3
CARSQATGERFDYW

SEQ ID NO: 922 - protein, 13 aa, Artificial Sequence
  Synthesized molecular recognition unit - heavy CDR3
CARSSDLRIFDYW

SEQ ID NO: 923 - protein, 16 aa, Artificial Sequence
  Synthesized molecular recognition unit - heavy CDR3
CARSSGWQNRFAFDIW

SEQ ID NO: 924 - protein, 14 aa, Artificial Sequence
  Synthesized molecular recognition unit - heavy CDR3
CARSSGYVGWFDPW

SEQ ID NO: 925 - protein, 10 aa, Artificial Sequence
  Synthesized molecular recognition unit - heavy CDR3
CARSTPFDPW

SEQ ID NO: 926 - protein, 24 aa, Artificial Sequence
  Synthesized molecular recognition unit - heavy CDR3
CARSVGEVGATMLGIGVWYWFDPW

SEQ ID NO: 927 - protein, 20 aa, Artificial Sequence
  Synthesized molecular recognition unit - heavy CDR3
CARSYYDSSGYPRKDAFDIW

SEQ ID NO: 928 - protein, 14 aa, Artificial Sequence
  Synthesized molecular recognition unit - heavy CDR3
CARTGRGYYGMDVW

SEQ ID NO: 929 - protein, 17 aa, Artificial Sequence
  Synthesized molecular recognition unit - heavy CDR3
CARTLTTPPYYYGMDVW

SEQ ID NO: 930 - protein, 12 aa, Artificial Sequence
  Synthesized molecular recognition unit - heavy CDR3
CARTYLKAFDIW

SEQ ID NO: 931 - protein, 22 aa, Artificial Sequence
  Synthesized molecular recognition unit - heavy CDR3
CARTYRIVGATPRYYYYGMDVW

SEQ ID NO: 932 - protein, 13 aa, Artificial Sequence
  Synthesized molecular recognition unit - heavy CDR3
CARVATGNAFDIW

SEQ ID NO: 933 - protein, 15 aa, Artificial Sequence
  Synthesized molecular recognition unit - heavy CDR3
CARVDGSGYYGIDYW

SEQ ID NO: 934 - protein, 11 aa, Artificial Sequence
  Synthesized molecular recognition unit - heavy CDR3
CARVFPLHDYW

SEQ ID NO: 935 - protein, 15 aa, Artificial Sequence
  Synthesized molecular recognition unit - heavy CDR3
CARVGATSAGGMDVW

SEQ ID NO: 936 - protein, 13 aa, Artificial Sequence
  Synthesized molecular recognition unit - heavy CDR3
CARVGPGGWFDPW

SEQ ID NO: 937 - protein, 13 aa, Artificial Sequence
  Synthesized molecular recognition unit - heavy CDR3
CARVGRGYSFDYW

SEQ ID NO: 938 - protein, 13 aa, Artificial Sequence
  Synthesized molecular recognition unit - heavy CDR3
CARVGWLRFLDYW

SEQ ID NO: 939 - protein, 16 aa, Artificial Sequence
  Synthesized molecular recognition unit - heavy CDR3
CARVIFSTVTTTNDIW

SEQ ID NO: 940 - protein, 13 aa, Artificial Sequence
  Synthesized molecular recognition unit - heavy CDR3
CARVKWELAIDYW

SEQ ID NO: 941 - protein, 25 aa, Artificial Sequence
  Synthesized molecular recognition unit - heavy CDR3
CARVLPGDSSGWYRGYYYYYGMDVW

SEQ ID NO: 942 - protein, 14 aa, Artificial Sequence
  Synthesized molecular recognition unit - heavy CDR3
CARVMLITDAFDIW

SEQ ID NO: 943 - protein, 15 aa, Artificial Sequence
  Synthesized molecular recognition unit - heavy CDR3
CARVPDFWSGYLDYW

SEQ ID NO: 944 - protein, 19 aa, Artificial Sequence
  Synthesized molecular recognition unit - heavy CDR3
CARVPTSPYDILTGPFDYW

SEQ ID NO: 945 - protein, 20 aa, Artificial Sequence
  Synthesized molecular recognition unit - heavy CDR3
CARVRARRFLVSDRSAFDIW

SEQ ID NO: 946 - protein, 21 aa, Artificial Sequence
  Synthesized molecular recognition unit - heavy CDR3
CARVRDYYDSSGYYYDYFDYW

SEQ ID NO: 947 - protein, 21 aa, Artificial Sequence
  Synthesized molecular recognition unit - heavy CDR3
CARVRSKAVAGTLPKRLFDIW

SEQ ID NO: 948 - protein, 13 aa, Artificial Sequence
  Synthesized molecular recognition unit - heavy CDR3
CARVSRGFAFDYW

SEQ ID NO: 949 - protein, 16 aa, Artificial Sequence
  Synthesized molecular recognition unit - heavy CDR3
CARVTLGASVDAFDIW

SEQ ID NO: 950 - protein, 15 aa, Artificial Sequence
  Synthesized molecular recognition unit - heavy CDR3
CARWAFPIPNAFDIW

SEQ ID NO: 951 - protein, 16 aa, Artificial Sequence
  Synthesized molecular recognition unit - heavy CDR3
CARWGDYGDLYYFDYW

SEQ ID NO: 952 - protein, 18 aa, Artificial Sequence
  Synthesized molecular recognition unit - heavy CDR3
CARWGKRLRGSPYYFDYW

SEQ ID NO: 953 - protein, 11 aa, Artificial Sequence
  Synthesized molecular recognition unit - heavy CDR3
CARWKNYFDPW

SEQ ID NO: 954 - protein, 11 aa, Artificial Sequence
  Synthesized molecular recognition unit - heavy CDR3
CARYGDYGDYW

SEQ ID NO: 955 - protein, 13 aa, Artificial Sequence
  Synthesized molecular recognition unit - heavy CDR3
CARYSSGGSLDYW

SEQ ID NO: 956 - protein, 11 aa, Artificial Sequence
  Synthesized molecular recognition unit - heavy CDR3
CASDPVTAATR

SEQ ID NO: 957 - protein, 11 aa, Artificial Sequence
  Synthesized molecular recognition unit - heavy CDR3
CASGLGYFDYW

SEQ ID NO: 958 - protein, 18 aa, Artificial Sequence
  Synthesized molecular recognition unit - heavy CDR3
CASKTTINSGWSREYHYW

SEQ ID NO: 959 - protein, 14 aa, Artificial Sequence
  Synthesized molecular recognition unit - heavy CDR3
CASPTGMTTNFDYW

SEQ ID NO: 960 - protein, 9 aa, Artificial Sequence
  Synthesized molecular recognition unit - heavy CDR3
CASPTVTRR

SEQ ID NO: 961 - protein, 18 aa, Artificial Sequence
  Synthesized molecular recognition unit - heavy CDR3
CASQNYYGSGSYPGFDYW

SEQ ID NO: 962 - protein, 13 aa, Artificial Sequence
  Synthesized molecular recognition unit - heavy CDR3
CASSHYAPGMDVW

SEQ ID NO: 963 - protein, 17 aa, Artificial Sequence
  Synthesized molecular recognition unit - heavy CDR3
CASSKEKATYYYGMDVW

SEQ ID NO: 964 - protein, 17 aa, Artificial Sequence
  Synthesized molecular recognition unit - heavy CDR3
CASSMVRVPYYYGMDVW

SEQ ID NO: 965 - protein, 16 aa, Artificial Sequence
  Synthesized molecular recognition unit - heavy CDR3
CASSRDGYNRLAFDIW

SEQ ID NO: 966 - protein, 21 aa, Artificial Sequence
  Synthesized molecular recognition unit - heavy CDR3
CASSSDYGDYLKEPNYGMDVW

SEQ ID NO: 967 - protein, 13 aa, Artificial Sequence
  Synthesized molecular recognition unit - heavy CDR3
CASTDPSSGLDYW

SEQ ID NO: 968 - protein, 11 aa, Artificial Sequence
  Synthesized molecular recognition unit - heavy CDR3
CATASGDFDYW

SEQ ID NO: 969 - protein, 14 aa, Artificial Sequence
  Synthesized molecular recognition unit - heavy CDR3
CATAYRRPGGLDVW

SEQ ID NO: 970 - protein, 26 aa, Artificial Sequence
  Synthesized molecular recognition unit - heavy CDR3
CATDLPVRKGFTYYDILTGSYGMDVW

SEQ ID NO: 971 - protein, 15 aa, Artificial Sequence
  Synthesized molecular recognition unit - heavy CDR3
CATGWPRYYYGMDVW

SEQ ID NO: 972 - protein, 14 aa, Artificial Sequence
  Synthesized molecular recognition unit - heavy CDR3
CATGYYYDYYFDYW

SEQ ID NO: 973 - protein, 15 aa, Artificial Sequence
  Synthesized molecular recognition unit - heavy CDR3
CATHDSSGYYSFDYW

SEQ ID NO: 974 - protein, 13 aa, Artificial Sequence
  Synthesized molecular recognition unit - heavy CDR3
CATLTPYGTVASY

SEQ ID NO: 975 - protein, 19 aa, Artificial Sequence
  Synthesized molecular recognition unit - heavy CDR3
CATSFGGGWIVVDTSLWYW

SEQ ID NO: 976 - protein, 22 aa, Artificial Sequence
  Synthesized molecular recognition unit - heavy CDR3
CATTQGVYSSSWYGGGRAFDIW

SEQ ID NO: 977 - protein, 25 aa, Artificial Sequence
  Synthesized molecular recognition unit - heavy CDR3
CATVQTNYYDSSGRFSYRAHYFDYW

SEQ ID NO: 978 - protein, 13 aa, Artificial Sequence
  Synthesized molecular recognition unit - heavy CDR3
CATYGDFGYFDLW

SEQ ID NO: 979 - protein, 11 aa, Artificial Sequence
  Synthesized molecular recognition unit - heavy CDR3
CEVHNFGATYW

SEQ ID NO: 980 - protein, 13 aa, Artificial Sequence
  Synthesized molecular recognition unit - heavy CDR3
CHFGVASVGLNYW

SEQ ID NO: 981 - protein, 12 aa, Artificial Sequence
  Synthesized molecular recognition unit - heavy CDR3
CIGVTYNGYTIG

SEQ ID NO: 982 - protein, 11 aa, Artificial Sequence
  Synthesized molecular recognition unit - heavy CDR3
CKVHNFEATYW

SEQ ID NO: 983 - protein, 11 aa, Artificial Sequence
  Synthesized molecular recognition unit - heavy CDR3
CKVHNFGATYW

SEQ ID NO: 984 - protein, 12 aa, Artificial Sequence
  Synthesized molecular recognition unit - heavy CDR3
CNADSLRGIDYW

SEQ ID NO: 985 - protein, 13 aa, Artificial Sequence
  Synthesized molecular recognition unit - heavy CDR3
CNADYGTWYGIGW

SEQ ID NO: 986 - protein, 22 aa, Artificial Sequence
  Synthesized molecular recognition unit - heavy CDR3
CNAGAPAWTYRMGTYYPQFGSW

SEQ ID NO: 987 - protein, 12 aa, Artificial Sequence
  Synthesized molecular recognition unit - heavy CDR3
CNALAPGVRGSW

SEQ ID NO: 988 - protein, 17 aa, Artificial Sequence
  Synthesized molecular recognition unit - heavy CDR3
CNARLDAVYGHSRYDSW

SEQ ID NO: 989 - protein, 14 aa, Artificial Sequence
  Synthesized molecular recognition unit - heavy CDR3
CNARLSFAGGMGYW

SEQ ID NO: 990 - protein, 12 aa, Artificial Sequence
  Synthesized molecular recognition unit - heavy CDR3
CNAVCKFGTTHW

SEQ ID NO: 991 - protein, 11 aa, Artificial Sequence
  Synthesized molecular recognition unit - heavy CDR3
CNAVNGRLNYW

SEQ ID NO: 992 - protein, 13 aa, Artificial Sequence
  Synthesized molecular recognition unit - heavy CDR3
CNAVSTDWTRDYW

SEQ ID NO: 993 - protein, 12 aa, Artificial Sequence
  Synthesized molecular recognition unit - heavy CDR3
CNAVTYNGYSIW

SEQ ID NO: 994 - protein, 12 aa, Artificial Sequence
  Synthesized molecular recognition unit - heavy CDR3
CNAVTYNGYTIW

SEQ ID NO: 995 - protein, 12 aa, Artificial Sequence
  Synthesized molecular recognition unit - heavy CDR3
CNAVWKFGTTHW

SEQ ID NO: 996 - protein, 18 aa, Artificial Sequence
  Synthesized molecular recognition unit - heavy CDR3
CNAWVLVAGSRGTSADYW

SEQ ID NO: 997 - protein, 12 aa, Artificial Sequence
  Synthesized molecular recognition unit - heavy CDR3
CNGVTYNGYTIW

SEQ ID NO: 998 - protein, 11 aa, Artificial Sequence
  Synthesized molecular recognition unit - heavy CDR3
CNLAQRGETYW

SEQ ID NO: 999 - protein, 16 aa, Artificial Sequence
  Synthesized molecular recognition unit - heavy CDR3
CNMGLGYSEYRPLGYW

SEQ ID NO: 1000 - protein, 19 aa, Artificial Sequence
  Synthesized molecular recognition unit - heavy CDR3
CNMRGNWYREGRPAEFLSW

SEQ ID NO: 1001 - protein, 12 aa, Artificial Sequence
  Synthesized molecular recognition unit - heavy CDR3
CNRVGSREYSYW

SEQ ID NO: 1002 - protein, 11 aa, Artificial Sequence
  Synthesized molecular recognition unit - heavy CDR3
CNSFPLRLHDW

SEQ ID NO: 1003 - protein, 10 aa, Artificial Sequence
  Synthesized molecular recognition unit - heavy CDR3
CNTGIPMLYW

SEQ ID NO: 1004 - protein, 15 aa, Artificial Sequence
  Synthesized molecular recognition unit - heavy CDR3
CNTVTYNAGCYKKYW

SEQ ID NO: 1005 - protein, 15 aa, Artificial Sequence
  Synthesized molecular recognition unit - heavy CDR3
CNTVTYTGGSYKNYW

SEQ ID NO: 1006 - protein, 16 aa, Artificial Sequence
  Synthesized molecular recognition unit - heavy CDR3
CNVITIVRGMGPRAYW

SEQ ID NO: 1007 - protein, 15 aa, Artificial Sequence
  Synthesized molecular recognition unit - heavy CDR3
CNVLAQNDGDYRTYG

SEQ ID NO: 1008 - protein, 15 aa, Artificial Sequence
  Synthesized molecular recognition unit - heavy CDR3
CNVLAQNDGDYRTYW

SEQ ID NO: 1009 - protein, 9 aa, Artificial Sequence
  Synthesized molecular recognition unit - heavy CDR3
CRVDAFDIW

SEQ ID NO: 1010 - protein, 20 aa, Artificial Sequence
  Synthesized molecular recognition unit - heavy CDR3
CSADKLDYLDDQPFKTWDYW

SEQ ID NO: 1011 - protein, 7 aa, Artificial Sequence
  Synthesized molecular recognition unit - heavy CDR3
CTDEESW

SEQ ID NO: 1012 - protein, 20 aa, Artificial Sequence
  Synthesized molecular recognition unit - heavy CDR3
CTILPAAAAGTYYYYGMDVW

SEQ ID NO: 1013 - protein, 13 aa, Artificial Sequence
  Synthesized molecular recognition unit - heavy CDR3
CTRDLYGGYRDYW

SEQ ID NO: 1014 - protein, 13 aa, Artificial Sequence
  Synthesized molecular recognition unit - heavy CDR3
CTRGNWNVGLANW

SEQ ID NO: 1015 - protein, 13 aa, Artificial Sequence
  Synthesized molecular recognition unit - heavy CDR3
CTRGSRIGWFDPW

SEQ ID NO: 1016 - protein, 11 aa, Artificial Sequence
  Synthesized molecular recognition unit - heavy CDR3
CTRPYDAFDIW

SEQ ID NO: 1017 - protein, 13 aa, Artificial Sequence
  Synthesized molecular recognition unit - heavy CDR3
CTRTIVGATPHYW

SEQ ID NO: 1018 - protein, 15 aa, Artificial Sequence
  Synthesized molecular recognition unit - heavy CDR3
CTSSFLTGSQPSGYW

SEQ ID NO: 1019 - protein, 18 aa, Artificial Sequence
  Synthesized molecular recognition unit - heavy CDR3
CTTDLRYDSSGPAAFDIW

SEQ ID NO: 1020 - protein, 12 aa, Artificial Sequence
  Synthesized molecular recognition unit - heavy CDR3
CTTDPLELPWYW

SEQ ID NO: 1021 - protein, 14 aa, Artificial Sequence
  Synthesized molecular recognition unit - heavy CDR3
CTTDRRYSTYFDLW

SEQ ID NO: 1022 - protein, 21 aa, Artificial Sequence
  Synthesized molecular recognition unit - heavy CDR3
CTTGLFPYYRYNWNNDAFDIW

SEQ ID NO: 1023 - protein, 10 aa, Artificial Sequence
  Synthesized molecular recognition unit - heavy CDR3
CTTPNYYDSR

SEQ ID NO: 1024 - protein, 22 aa, Artificial Sequence
  Synthesized molecular recognition unit - heavy CDR3
CTTRTYDSSGYYETQNYYMDVW

SEQ ID NO: 1025 - protein, 19 aa, Artificial Sequence
  Synthesized molecular recognition unit - heavy CDR3
CTTTEYSSSPDYYYGMDVW

SEQ ID NO: 1026 - protein, 10 aa, Artificial Sequence
  Synthesized molecular recognition unit - heavy CDR3
CTTTTVTTSW

SEQ ID NO: 1027 - protein, 12 aa, Artificial Sequence
  Synthesized molecular recognition unit - heavy CDR3
CVKDRAWGFDYW

SEQ ID NO: 1028 - protein, 16 aa, Artificial Sequence
  Synthesized molecular recognition unit - heavy CDR3
CVKFGMNLGYSGYDYW

SEQ ID NO: 1029 - protein, 16 aa, Artificial Sequence
  Synthesized molecular recognition unit - heavy CDR3
CVRDLRPSGDLNFDYW

SEQ ID NO: 1030 - protein, 11 aa, Artificial Sequence
  Synthesized molecular recognition unit - heavy CDR3
CWGGSYYGDYW

SEQ ID NO: 1031 - protein, 18 aa, Artificial Sequence
  Synthesized molecular recognition unit - heavy CDR3
CWTGLLWFGESTDAFDIW

SEQ ID NO: 1032 - protein, 11 aa, Artificial Sequence
  Synthesized molecular recognition unit - heavy CDR3
CYLEGPLDVYW

SEQ ID NO: 1033 - protein, 9 aa, Artificial Sequence
  Synthesized molecular recognition unit - heavy CDR3
NFIKYVFAN

SEQ ID NO: 1034 - protein, 6 aa, Artificial Sequence
  Synthesized molecular recognition unit - heavy CDR3
PRLDYW

SEQ ID NO: 1035 - protein, 14 aa, Artificial Sequence
  Synthesized molecular recognition unit - light CDR1
GLSSGSVSTNYYPS

SEQ ID NO: 1036 - protein, 16 aa, Artificial Sequence
  Synthesized molecular recognition unit - light CDR1
KSSQSLLHSDGKTYLY

SEQ ID NO: 1037 - protein, 17 aa, Artificial Sequence
  Synthesized molecular recognition unit - light CDR1
KSSQSVLYSSNNKNYLA

SEQ ID NO: 1038 - protein, 11 aa, Artificial Sequence
  Synthesized molecular recognition unit - light CDR1
QANQDISNYLN

SEQ ID NO: 1039 - protein, 11 aa, Artificial Sequence
  Synthesized molecular recognition unit - light CDR1
QASHDINIALN

SEQ ID NO: 1040 - protein, 11 aa, Artificial Sequence
  Synthesized molecular recognition unit - light CDR1
QASQDIDNYLN

SEQ ID NO: 1041 - protein, 11 aa, Artificial Sequence
  Synthesized molecular recognition unit - light CDR1
QASQDIGKYLN

SEQ ID NO: 1042 - protein, 11 aa, Artificial Sequence
  Synthesized molecular recognition unit - light CDR1
QASQDIGNYLN

SEQ ID NO: 1043 - protein, 11 aa, Artificial Sequence
  Synthesized molecular recognition unit - light CDR1
QASQDIRNYLN

SEQ ID NO: 1044 - protein, 11 aa, Artificial Sequence
  Synthesized molecular recognition unit - light CDR1
QASQDISHYLN

SEQ ID NO: 1045 - protein, 11 aa, Artificial Sequence
  Synthesized molecular recognition unit - light CDR1
QASQDISNRLN

SEQ ID NO: 1046 - protein, 11 aa, Artificial Sequence
  Synthesized molecular recognition unit - light CDR1
QASQDISNYLN

SEQ ID NO: 1047 - protein, 11 aa, Artificial Sequence
  Synthesized molecular recognition unit - light CDR1
QASQDISSYLN

SEQ ID NO: 1048 - protein, 11 aa, Artificial Sequence
  Synthesized molecular recognition unit - light CDR1
QASQDITNYLN

SEQ ID NO: 1049 - protein, 11 aa, Artificial Sequence
  Synthesized molecular recognition unit - light CDR1
QASQGISNNLN

SEQ ID NO: 1050 - protein, 11 aa, Artificial Sequence
  Synthesized molecular recognition unit - light CDR1
QASQGISNYLN

SEQ ID NO: 1051 - protein, 11 aa, Artificial Sequence
  Synthesized molecular recognition unit - light CDR1
QATQNIKKYLN

SEQ ID NO: 1052 - protein, 11 aa, Artificial Sequence
  Synthesized molecular recognition unit - light CDR1
QGDSLRTYYAS

SEQ ID NO: 1053 - protein, 11 aa, Artificial Sequence
  Synthesized molecular recognition unit - light CDR1
QTSQDINNNLN

SEQ ID NO: 1054 - protein, 11 aa, Artificial Sequence
  Synthesized molecular recognition unit - light CDR1
RAIQSISSYLN

SEQ ID NO: 1055 - protein, 11 aa, Artificial Sequence
  Synthesized molecular recognition unit - light CDR1
RASESVSSNLA

SEQ ID NO: 1056 - protein, 12 aa, Artificial Sequence
  Synthesized molecular recognition unit - light CDR1
RASESVSSSSFA

SEQ ID NO: 1057 - protein, 11 aa, Artificial Sequence
  Synthesized molecular recognition unit - light CDR1
RASHDIGTFLA

SEQ ID NO: 1058 - protein, 11 aa, Artificial Sequence
  Synthesized molecular recognition unit - light CDR1
RASQAISNSLA

SEQ ID NO: 1059 - protein, 11 aa, Artificial Sequence
  Synthesized molecular recognition unit - light CDR1
RASQAISNYLN

SEQ ID NO: 1060 - protein, 11 aa, Artificial Sequence
  Synthesized molecular recognition unit - light CDR1
RASQAISSYLA

SEQ ID NO: 1061 - protein, 11 aa, Artificial Sequence
  Synthesized molecular recognition unit - light CDR1
RASQDIGSFLA

SEQ ID NO: 1062 - protein, 11 aa, Artificial Sequence
  Synthesized molecular recognition unit - light CDR1
RASQDIRDELA

SEQ ID NO: 1063 - protein, 11 aa, Artificial Sequence
  Synthesized molecular recognition unit - light CDR1
RASQDIRSALA

SEQ ID NO: 1064 - protein, 11 aa, Artificial Sequence
  Synthesized molecular recognition unit - light CDR1
RASQDISSWLA

SEQ ID NO: 1065 - protein, 11 aa, Artificial Sequence
  Synthesized molecular recognition unit - light CDR1
RASQDISSYLA

SEQ ID NO: 1066 - protein, 11 aa, Artificial Sequence
  Synthesized molecular recognition unit - light CDR1
RASQDVDTWLA

SEQ ID NO: 1067 - protein, 11 aa, Artificial Sequence
  Synthesized molecular recognition unit - light CDR1
RASQGINNYLA

SEQ ID NO: 1068 - protein, 11 aa, Artificial Sequence
  Synthesized molecular recognition unit - light CDR1
RASQGIRNDLA

SEQ ID NO: 1069 - protein, 11 aa, Artificial Sequence
  Synthesized molecular recognition unit - light CDR1
RASQGIRNDLG

SEQ ID NO: 1070 - protein, 11 aa, Artificial Sequence
  Synthesized molecular recognition unit - light CDR1
RASQGIRSDLA

SEQ ID NO: 1071 - protein, 11 aa, Artificial Sequence
  Synthesized molecular recognition unit - light CDR1
RASQGISNNIN

SEQ ID NO: 1072 - protein, 11 aa, Artificial Sequence
  Synthesized molecular recognition unit - light CDR1
RASQGISNNLN

SEQ ID NO: 1073 - protein, 11 aa, Artificial Sequence
  Synthesized molecular recognition unit - light CDR1
RASQGISNWLA

SEQ ID NO: 1074 - protein, 11 aa, Artificial Sequence
  Synthesized molecular recognition unit - light CDR1
RASQGISNYLA

SEQ ID NO: 1075 - protein, 11 aa, Artificial Sequence
  Synthesized molecular recognition unit - light CDR1
RASQGISRTLZ

SEQ ID NO: 1076 - protein, 11 aa, Artificial Sequence
  Synthesized molecular recognition unit - light CDR1
RASQGISSALA

SEQ ID NO: 1077 - protein, 11 aa, Artificial Sequence
  Synthesized molecular recognition unit - light CDR1
RASQGITKSLA

SEQ ID NO: 1078 - protein, 11 aa, Artificial Sequence
  Synthesized molecular recognition unit - light CDR1
RASQGVGDYLA

SEQ ID NO: 1079 - protein, 11 aa, Artificial Sequence
  Synthesized molecular recognition unit - light CDR1
RASQGVSTZLS

SEQ ID NO: 1080 - protein, 11 aa, Artificial Sequence
  Synthesized molecular recognition unit - light CDR1
RASQNIGSRLA

SEQ ID NO: 1081 - protein, 11 aa, Artificial Sequence
  Synthesized molecular recognition unit - light CDR1
RASQNINNYLA

SEQ ID NO: 1082 - protein, 11 aa, Artificial Sequence
  Synthesized molecular recognition unit - light CDR1
RASQNVNDWLA

SEQ ID NO: 1083 - protein, 11 aa, Artificial Sequence
  Synthesized molecular recognition unit - light CDR1
RASQRVGNNLA

SEQ ID NO: 1084 - protein, 11 aa, Artificial Sequence
  Synthesized molecular recognition unit - light CDR1
RASQSIGRWLA

SEQ ID NO: 1085 - protein, 11 aa, Artificial Sequence
  Synthesized molecular recognition unit - light CDR1
RASQSIGSNLD

SEQ ID NO: 1086 - protein, 11 aa, Artificial Sequence
  Synthesized molecular recognition unit - light CDR1
RASQSIGSNLN

SEQ ID NO: 1087 - protein, 11 aa, Artificial Sequence
  Synthesized molecular recognition unit - light CDR1
RASQSIGSSLH

SEQ ID NO: 1088 - protein, 11 aa, Artificial Sequence
  Synthesized molecular recognition unit - light CDR1
RASQSIGTYLN

SEQ ID NO: 1089 - protein, 12 aa, Artificial Sequence
  Synthesized molecular recognition unit - light CDR1
RASQSINRNYLG

SEQ ID NO: 1090 - protein, 11 aa, Artificial Sequence
  Synthesized molecular recognition unit - light CDR1
RASQSINRWLA

SEQ ID NO: 1091 - protein, 11 aa, Artificial Sequence
  Synthesized molecular recognition unit - light CDR1
RASQSINSNLA

SEQ ID NO: 1092 - protein, 11 aa, Artificial Sequence
  Synthesized molecular recognition unit - light CDR1
RASQSISNNLN

SEQ ID NO: 1093 - protein, 11 aa, Artificial Sequence
  Synthesized molecular recognition unit - light CDR1
RASQSISRSLA

SEQ ID NO: 1094 - protein, 11 aa, Artificial Sequence
  Synthesized molecular recognition unit - light CDR1
RASQSISRWLA

SEQ ID NO: 1095 - protein, 11 aa, Artificial Sequence
  Synthesized molecular recognition unit - light CDR1
RASQSISRYLN

SEQ ID NO: 1096 - protein, 11 aa, Artificial Sequence
  Synthesized molecular recognition unit - light CDR1
RASQSISSHZN

SEQ ID NO: 1097 - protein, 12 aa, Artificial Sequence
  Synthesized molecular recognition unit - light CDR1
RASQSISSKSLA

SEQ ID NO: 1098 - protein, 11 aa, Artificial Sequence
  Synthesized molecular recognition unit - light CDR1
RASQSISSYLN

SEQ ID NO: 1099 - protein, 11 aa, Artificial Sequence
  Synthesized molecular recognition unit - light CDR1
RASQSISTNVN

SEQ ID NO: 1100 - protein, 11 aa, Artificial Sequence
  Synthesized molecular recognition unit - light CDR1
RASQSISTYLA

SEQ ID NO: 1101 - protein, 11 aa, Artificial Sequence
  Synthesized molecular recognition unit - light CDR1
RASQSISTYLS

SEQ ID NO: 1102 - protein, 11 aa, Artificial Sequence
  Synthesized molecular recognition unit - light CDR1
RASQSISZWLA

SEQ ID NO: 1103 - protein, 11 aa, Artificial Sequence
  Synthesized molecular recognition unit - light CDR1
RASQSISZYZN

SEQ ID NO: 1104 - protein, 11 aa, Artificial Sequence
  Synthesized molecular recognition unit - light CDR1
RASQSIVSYLN

SEQ ID NO: 1105 - protein, 11 aa, Artificial Sequence
  Synthesized molecular recognition unit - light CDR1
RASQSIZZYZN

SEQ ID NO: 1106 - protein, 11 aa, Artificial Sequence
  Synthesized molecular recognition unit - light CDR1
RASQSLRSKLA

SEQ ID NO: 1107 - protein, 11 aa, Artificial Sequence
  Synthesized molecular recognition unit - light CDR1
RASQSVGRWMA

SEQ ID NO: 1108 - protein, 11 aa, Artificial Sequence
  Synthesized molecular recognition unit - light CDR1
RASQSVGSNLA

SEQ ID NO: 1109 - protein, 11 aa, Artificial Sequence
  Synthesized molecular recognition unit - light CDR1
RASQSVGSYLA

SEQ ID NO: 1110 - protein, 11 aa, Artificial Sequence
  Synthesized molecular recognition unit - light CDR1
RASQSVGTYLT

SEQ ID NO: 1111 - protein, 12 aa, Artificial Sequence
  Synthesized molecular recognition unit - light CDR1
RASQSVNNTYVA

SEQ ID NO: 1112 - protein, 11 aa, Artificial Sequence
  Synthesized molecular recognition unit - light CDR1
RASQSVSGYLA

SEQ ID NO: 1113 - protein, 11 aa, Artificial Sequence
  Synthesized molecular recognition unit - light CDR1
RASQSVSRKLA

SEQ ID NO: 1114 - protein, 11 aa, Artificial Sequence
  Synthesized molecular recognition unit - light CDR1
RASQSVSRNLA

SEQ ID NO: 1115 - protein, 11 aa, Artificial Sequence
  Synthesized molecular recognition unit - light CDR1
RASQSVSSDLA

SEQ ID NO: 1116 - protein, 11 aa, Artificial Sequence
  Synthesized molecular recognition unit - light CDR1
RASQSVSSNLA

SEQ ID NO: 1117 - protein, 12 aa, Artificial Sequence
  Synthesized molecular recognition unit - light CDR1
RASQSVSSNQLA

SEQ ID NO: 1118 - protein, 12 aa, Artificial Sequence
  Synthesized molecular recognition unit - light CDR1
RASQSVSSNYLS

SEQ ID NO: 1119 - protein, 12 aa, Artificial Sequence
  Synthesized molecular recognition unit - light CDR1
RASQSVSSSYLS

SEQ ID NO: 1120 - protein, 11 aa, Artificial Sequence
  Synthesized molecular recognition unit - light CDR1
RASQSVSSWLA

SEQ ID NO: 1121 - protein, 11 aa, Artificial Sequence
  Synthesized molecular recognition unit - light CDR1
RASQSVSSYLA

SEQ ID NO: 1122 - protein, 11 aa, Artificial Sequence
  Synthesized molecular recognition unit - light CDR1
RASQSVSTNLA

SEQ ID NO: 1123 - protein, 12 aa, Artificial Sequence
  Synthesized molecular recognition unit - light CDR1
RASQSVSTSYLA

SEQ ID NO: 1124 - protein, 11 aa, Artificial Sequence
  Synthesized molecular recognition unit - light CDR1
RASQSVTSSLA

SEQ ID NO: 1125 - protein, 11 aa, Artificial Sequence
  Synthesized molecular recognition unit - light CDR1
RASQTINNQLA

SEQ ID NO: 1126 - protein, 11 aa, Artificial Sequence
  Synthesized molecular recognition unit - light CDR1
RASQTISRYLN

SEQ ID NO: 1127 - protein, 11 aa, Artificial Sequence
  Synthesized molecular recognition unit - light CDR1
RASQZVSRZZA

SEQ ID NO: 1128 - protein, 11 aa, Artificial Sequence
  Synthesized molecular recognition unit - light CDR1
RASRSISSYFN

SEQ ID NO: 1129 - protein, 11 aa, Artificial Sequence
  Synthesized molecular recognition unit - light CDR1
RATQTISTYLN

SEQ ID NO: 1130 - protein, 16 aa, Artificial Sequence
  Synthesized molecular recognition unit - light CDR1
RSSESLLHSDGKTYLY

SEQ ID NO: 1131 - protein, 11 aa, Artificial Sequence
  Synthesized molecular recognition unit - light CDR1
RSSQNIFQSLN

SEQ ID NO: 1132 - protein, 11 aa, Artificial Sequence
  Synthesized molecular recognition unit - light CDR1
RSSQNVSSYLA

SEQ ID NO: 1133 - protein, 17 aa, Artificial Sequence
  Synthesized molecular recognition unit - light CDR1
RSSQSLLDSDDGNTYLD

SEQ ID NO: 1134 - protein, 16 aa, Artificial Sequence
  Synthesized molecular recognition unit - light CDR1
RSSQSLLHSDGKTYLY

SEQ ID NO: 1135 - protein, 16 aa, Artificial Sequence
  Synthesized molecular recognition unit - light CDR1
RSSQSLLHSDGYTYLY

SEQ ID NO: 1136 - protein, 16 aa, Artificial Sequence
  Synthesized molecular recognition unit - light CDR1
RSSQSLLHSNGFNYVD

SEQ ID NO: 1137 - protein, 16 aa, Artificial Sequence
  Synthesized molecular recognition unit - light CDR1
RSSQSLLHSNGNTYLD

SEQ ID NO: 1138 - protein, 16 aa, Artificial Sequence
  Synthesized molecular recognition unit - light CDR1
RSSQSLLHSNGYNYLD

SEQ ID NO: 1139 - protein, 16 aa, Artificial Sequence
  Synthesized molecular recognition unit - light CDR1
RSSQSLLRRNGHNYVD

SEQ ID NO: 1140 - protein, 16 aa, Artificial Sequence
  Synthesized molecular recognition unit - light CDR1
RSSQSLVHSDGNTYLS

SEQ ID NO: 1141 - protein, 12 aa, Artificial Sequence
  Synthesized molecular recognition unit - light CDR1
RSSQYLSSAYLA

SEQ ID NO: 1142 - protein, 17 aa, Artificial Sequence
  Synthesized molecular recognition unit - light CDR1
RSSRSLLDTDDGNTYLD

SEQ ID NO: 1143 - protein, 16 aa, Artificial Sequence
  Synthesized molecular recognition unit - light CDR1
RSSRSLLHSDGKTYLY

SEQ ID NO: 1144 - protein, 16 aa, Artificial Sequence
  Synthesized molecular recognition unit - light CDR1
RSSRSLLHSNGNTYLQ

SEQ ID NO: 1145 - protein, 16 aa, Artificial Sequence
  Synthesized molecular recognition unit - light CDR1
RSSRSLLHSNGNTYLR

SEQ ID NO: 1146 - protein, 16 aa, Artificial Sequence
  Synthesized molecular recognition unit - light CDR1
RSSRSLLHTNGYNYLD

SEQ ID NO: 1147 - protein, 16 aa, Artificial Sequence
  Synthesized molecular recognition unit - light CDR1
RSSRSLLHTSGYNYLD

SEQ ID NO: 1148 - protein, 12 aa, Artificial Sequence
  Synthesized molecular recognition unit - light CDR1
RTSERSSISSFA

SEQ ID NO: 1149 - protein, 11 aa, Artificial Sequence
  Synthesized molecular recognition unit - light CDR1
RTSQSISSYLN

SEQ ID NO: 1150 - protein, 11 aa, Artificial Sequence
  Synthesized molecular recognition unit - light CDR1
RTSQSVSSNLA

SEQ ID NO: 1151 - protein, 11 aa, Artificial Sequence
  Synthesized molecular recognition unit - light CDR1
RVSQGISSALA

SEQ ID NO: 1152 - protein, 11 aa, Artificial Sequence
  Synthesized molecular recognition unit - light CDR1
SGDKLGKKYAS

SEQ ID NO: 1153 - protein, 11 aa, Artificial Sequence
  Synthesized molecular recognition unit - light CDR1
SGDNIGSFYVH

SEQ ID NO: 1154 - protein, 11 aa, Artificial Sequence
  Synthesized molecular recognition unit - light CDR1
SGDKVGHKYAS

SEQ ID NO: 1155 - protein, 11 aa, Artificial Sequence
  Synthesized molecular recognition unit - light CDR1
SGNTLGSHYVS

SEQ ID NO: 1156 - protein, 13 aa, Artificial Sequence
  Synthesized molecular recognition unit - light CDR1
SGSSSNIGSHTVS

SEQ ID NO: 1157 - protein, 14 aa, Artificial Sequence
  Synthesized molecular recognition unit - light CDR1
SGTSSNIGAGYDVH

SEQ ID NO: 1158 - protein, 14 aa, Artificial Sequence
  Synthesized molecular recognition unit - light CDR1
TGSSSNIGAGFGVH

SEQ ID NO: 1159 - protein, 14 aa, Artificial Sequence
  Synthesized molecular recognition unit - light CDR1
TGTSSDVGGYNSVS

SEQ ID NO: 1160 - protein, 13 aa, Artificial Sequence
  Synthesized molecular recognition unit - light CDR1
TRSSGSIASNYVQ

SEQ ID NO: 1161 - protein, 14 aa, Artificial Sequence
  Synthesized molecular recognition unit - light CDR1
TRSSSNIGAGYDVH

SEQ ID NO: 1162 - protein, 16 aa, Artificial Sequence
  Synthesized molecular recognition unit - light CDR1
TSSQSLLHSDGKTYLY

SEQ ID NO: 1163 - protein, 11 aa, Artificial Sequence
  Synthesized molecular recognition unit - light CDR1
ZACLRIISYLN

SEQ ID NO: 1164 - protein, 11 aa, Artificial Sequence
  Synthesized molecular recognition unit - light CDR1
ZPZQTZZSHLN

SEQ ID NO: 1165 - protein, 7 aa, Artificial Sequence
  Synthesized molecular recognition unit - light CDR2
AASALQS

SEQ ID NO: 1166 - protein, 7 aa, Artificial Sequence
  Synthesized molecular recognition unit - light CDR2
AASNLET

SEQ ID NO: 1167 - protein, 7 aa, Artificial Sequence
  Synthesized molecular recognition unit - light CDR2
AASNLLG

SEQ ID NO: 1168 - protein, 7 aa, Artificial Sequence
  Synthesized molecular recognition unit - light CDR2
AASNLQL

SEQ ID NO: 1169 - protein, 7 aa, Artificial Sequence
  Synthesized molecular recognition unit - light CDR2
AASNLQS

SEQ ID NO: 1170 - protein, 7 aa, Artificial Sequence
  Synthesized molecular recognition unit - light CDR2
AASRLES

SEQ ID NO: 1171 - protein, 7 aa, Artificial Sequence
  Synthesized molecular recognition unit - light CDR2
AASRLQS

SEQ ID NO: 1172 - protein, 7 aa, Artificial Sequence
  Synthesized molecular recognition unit - light CDR2
AASRRAT

SEQ ID NO: 1173 - protein, 7 aa, Artificial Sequence
  Synthesized molecular recognition unit - light CDR2
AASSLHT

SEQ ID NO: 1174 - protein, 7 aa, Artificial Sequence
  Synthesized molecular recognition unit - light CDR2
AASSLQR

SEQ ID NO: 1175 - protein, 7 aa, Artificial Sequence
  Synthesized molecular recognition unit - light CDR2
AASSLQS

SEQ ID NO: 1176 - protein, 7 aa, Artificial Sequence
  Synthesized molecular recognition unit - light CDR2
AASSRVT

SEQ ID NO: 1177 - protein, 7 aa, Artificial Sequence
  Synthesized molecular recognition unit - light CDR2
AASTLES

SEQ ID NO: 1178 - protein, 7 aa, Artificial Sequence
  Synthesized molecular recognition unit - light CDR2
AASTLET

SEQ ID NO: 1179 - protein, 7 aa, Artificial Sequence
  Synthesized molecular recognition unit - light CDR2
AASTLQS

SEQ ID NO: 1180 - protein, 7 aa, Artificial Sequence
  Synthesized molecular recognition unit - light CDR2
AASTLQT

SEQ ID NO: 1181 - protein, 7 aa, Artificial Sequence
  Synthesized molecular recognition unit - light CDR2
AASTSQS

SEQ ID NO: 1182 - protein, 7 aa, Artificial Sequence
  Synthesized molecular recognition unit - light CDR2
ASSTLQT

SEQ ID NO: 1183 - protein, 7 aa, Artificial Sequence
  Synthesized molecular recognition unit - light CDR2
ATSTLQS

SEQ ID NO: 1184 - protein, 7 aa, Artificial Sequence
  Synthesized molecular recognition unit - light CDR2
DASIRAT

SEQ ID NO: 1185 - protein, 7 aa, Artificial Sequence
  Synthesized molecular recognition unit - light CDR2
DASNLET

SEQ ID NO: 1186 - protein, 7 aa, Artificial Sequence
  Synthesized molecular recognition unit - light CDR2
DASNLQS

SEQ ID NO: 1187 - protein, 7 aa, Artificial Sequence
  Synthesized molecular recognition unit - light CDR2
DASNRAS

SEQ ID NO: 1188 - protein, 7 aa, Artificial Sequence
  Synthesized molecular recognition unit - light CDR2
DASNRAT

SEQ ID NO: 1189 - protein, 7 aa, Artificial Sequence
  Synthesized molecular recognition unit - light CDR2
DASSLES

SEQ ID NO: 1190 - protein, 7 aa, Artificial Sequence
  Synthesized molecular recognition unit - light CDR2
DASSLQS

SEQ ID NO: 1191 - protein, 7 aa, Artificial Sequence
  Synthesized molecular recognition unit - light CDR2
DASTLET

SEQ ID NO: 1192 - protein, 7 aa, Artificial Sequence
  Synthesized molecular recognition unit - light CDR2
DASTLKR

SEQ ID NO: 1193 - protein, 7 aa, Artificial Sequence
  Synthesized molecular recognition unit - light CDR2
DASTLQT

SEQ ID NO: 1194 - protein, 7 aa, Artificial Sequence
  Synthesized molecular recognition unit - light CDR2
DTSNRAT

SEQ ID NO: 1195 - protein, 7 aa, Artificial Sequence
  Synthesized molecular recognition unit - light CDR2
DVSNLER

SEQ ID NO: 1196 - protein, 7 aa, Artificial Sequence
  Synthesized molecular recognition unit - light CDR2
DVTKRPS

SEQ ID NO: 1197 - protein, 7 aa, Artificial Sequence
  Synthesized molecular recognition unit - light CDR2
EASSVAS

SEQ ID NO: 1198 - protein, 7 aa, Artificial Sequence
  Synthesized molecular recognition unit - light CDR2
EASTLQS

SEQ ID NO: 1199 - protein, 7 aa, Artificial Sequence
  Synthesized molecular recognition unit - light CDR2
EDSQRPS

SEQ ID NO: 1200 - protein, 8 aa, Artificial Sequence
  Synthesized molecular recognition unit - light CDR2
EKDNRPSG

SEQ ID NO: 1201 - protein, 8 aa, Artificial Sequence
  Synthesized molecular recognition unit - light CDR2
DKSNRPSG

SEQ ID NO: 1202 - protein, 7 aa, Artificial Sequence
  Synthesized molecular recognition unit - light CDR2
ENDKRPS

SEQ ID NO: 1203 - protein, 7 aa, Artificial Sequence
  Synthesized molecular recognition unit - light CDR2
EVSSLQG

SEQ ID NO: 1204 - protein, 7 aa, Artificial Sequence
  Synthesized molecular recognition unit - light CDR2
EVSSVQG

SEQ ID NO: 1205 - protein, 7 aa, Artificial Sequence
  Synthesized molecular recognition unit - light CDR2
FASSLQS

SEQ ID NO: 1206 - protein, 7 aa, Artificial Sequence
  Synthesized molecular recognition unit - light CDR2
FGSYRAS

SEQ ID NO: 1207 - protein, 7 aa, Artificial Sequence
  Synthesized molecular recognition unit - light CDR2
GASNLQS

SEQ ID NO: 1208 - protein, 7 aa, Artificial Sequence
  Synthesized molecular recognition unit - light CDR2
GASNRAS

SEQ ID NO: 1209 - protein, 7 aa, Artificial Sequence
  Synthesized molecular recognition unit - light CDR2
GASNRPT

SEQ ID NO: 1210 - protein, 7 aa, Artificial Sequence
  Synthesized molecular recognition unit - light CDR2
GASSLES

SEQ ID NO: 1211 - protein, 7 aa, Artificial Sequence
  Synthesized molecular recognition unit - light CDR2
GASSLQS

SEQ ID NO: 1212 - protein, 7 aa, Artificial Sequence
  Synthesized molecular recognition unit - light CDR2
GASSRAP

SEQ ID NO: 1213 - protein, 7 aa, Artificial Sequence
  Synthesized molecular recognition unit - light CDR2
GASSRAT

SEQ ID NO: 1214 - protein, 7 aa, Artificial Sequence
  Synthesized molecular recognition unit - light CDR2
GASTLQR

SEQ ID NO: 1215 - protein, 7 aa, Artificial Sequence
  Synthesized molecular recognition unit - light CDR2
GASTLQS

SEQ ID NO: 1216 - protein, 7 aa, Artificial Sequence
  Synthesized molecular recognition unit - light CDR2
GASTRAA

SEQ ID NO: 1217 - protein, 7 aa, Artificial Sequence
  Synthesized molecular recognition unit - light CDR2
GASTRAT

SEQ ID NO: 1218 - protein, 7 aa, Artificial Sequence
  Synthesized molecular recognition unit - light CDR2
GASTVES

SEQ ID NO: 1219 - protein, 7 aa, Artificial Sequence
  Synthesized molecular recognition unit - light CDR2
GKNNRPS

SEQ ID NO: 1220 - protein, 7 aa, Artificial Sequence
  Synthesized molecular recognition unit - light CDR2
GNSIRPS

SEQ ID NO: 1221 - protein, 7 aa, Artificial Sequence
  Synthesized molecular recognition unit - light CDR2
GSSNRAA

SEQ ID NO: 1222 - protein, 7 aa, Artificial Sequence
  Synthesized molecular recognition unit - light CDR2
GTSTRAT

SEQ ID NO: 1223 - protein, 7 aa, Artificial Sequence
  Synthesized molecular recognition unit - light CDR2
GVSNRAT

SEQ ID NO: 1224 - protein, 7 aa, Artificial Sequence
  Synthesized molecular recognition unit - light CDR2
KASNLET

SEQ ID NO: 1225 - protein, 7 aa, Artificial Sequence
  Synthesized molecular recognition unit - light CDR2
KASSLEN

SEQ ID NO: 1226 - protein, 7 aa, Artificial Sequence
  Synthesized molecular recognition unit - light CDR2
KASSLES

SEQ ID NO: 1227 - protein, 7 aa, Artificial Sequence
  Synthesized molecular recognition unit - light CDR2
KASSLQS

SEQ ID NO: 1228 - protein, 7 aa, Artificial Sequence
  Synthesized molecular recognition unit - light CDR2
KASTLDT

SEQ ID NO: 1229 - protein, 7 aa, Artificial Sequence
  Synthesized molecular recognition unit - light CDR2
KASTLES

SEQ ID NO: 1230 - protein, 7 aa, Artificial Sequence
  Synthesized molecular recognition unit - light CDR2
KISNRFS

SEQ ID NO: 1231 - protein, 7 aa, Artificial Sequence
  Synthesized molecular recognition unit - light CDR2
LASRRAS

SEQ ID NO: 1232 - protein, 7 aa, Artificial Sequence
  Synthesized molecular recognition unit - light CDR2
LGFNRAS

SEQ ID NO: 1233 - protein, 7 aa, Artificial Sequence
  Synthesized molecular recognition unit - light CDR2
LGSDRAS

SEQ ID NO: 1234 - protein, 7 aa, Artificial Sequence
  Synthesized molecular recognition unit - light CDR2
LGSDRTS

SEQ ID NO: 1235 - protein, 7 aa, Artificial Sequence
  Synthesized molecular recognition unit - light CDR2
LGSHRAS

SEQ ID NO: 1236 - protein, 7 aa, Artificial Sequence
  Synthesized molecular recognition unit - light CDR2
LGSKRAS

SEQ ID NO: 1237 - protein, 7 aa, Artificial Sequence
  Synthesized molecular recognition unit - light CDR2
LGSNRAS

SEQ ID NO: 1238 - protein, 7 aa, Artificial Sequence
  Synthesized molecular recognition unit - light CDR2
MGSNRAP

SEQ ID NO: 1239 - protein, 7 aa, Artificial Sequence
  Synthesized molecular recognition unit - light CDR2
MGSYRAS

SEQ ID NO: 1240 - protein, 7 aa, Artificial Sequence
  Synthesized molecular recognition unit - light CDR2
MLSSRAP

SEQ ID NO: 1241 - protein, 7 aa, Artificial Sequence
  Synthesized molecular recognition unit - light CDR2
NTSNRAT

SEQ ID NO: 1242 - protein, 7 aa, Artificial Sequence
  Synthesized molecular recognition unit - light CDR2
PASSLQS

SEQ ID NO: 1243 - protein, 7 aa, Artificial Sequence
  Synthesized molecular recognition unit - light CDR2
QASNLES

SEQ ID NO: 1244 - protein, 7 aa, Artificial Sequence
  Synthesized molecular recognition unit - light CDR2
QASSLDS

SEQ ID NO: 1245 - protein, 7 aa, Artificial Sequence
  Synthesized molecular recognition unit - light CDR2
QASSLIS

SEQ ID NO: 1246 - protein, 7 aa, Artificial Sequence
  Synthesized molecular recognition unit - light CDR2
QDSKRPS

SEQ ID NO: 1247 - protein, 7 aa, Artificial Sequence
  Synthesized molecular recognition unit - light CDR2
RASSLQS

SEQ ID NO: 1248 - protein, 7 aa, Artificial Sequence
  Synthesized molecular recognition unit - light CDR2
RASTLES

SEQ ID NO: 1249 - protein, 7 aa, Artificial Sequence
  Synthesized molecular recognition unit - light CDR2
RASTLQS

SEQ ID NO: 1250 - protein, 7 aa, Artificial Sequence
  Synthesized molecular recognition unit - light CDR2
RTSTLES

SEQ ID NO: 1251 - protein, 7 aa, Artificial Sequence
  Synthesized molecular recognition unit - light CDR2
RVSSRFS

SEQ ID NO: 1252 - protein, 7 aa, Artificial Sequence
  Synthesized molecular recognition unit - light CDR2
SASNLQS

SEQ ID NO: 1253 - protein, 7 aa, Artificial Sequence
  Synthesized molecular recognition unit - light CDR2
SASRLQI

SEQ ID NO: 1254 - protein, 7 aa, Artificial Sequence
  Synthesized molecular recognition unit - light CDR2
SASSLQS

SEQ ID NO: 1255 - protein, 7 aa, Artificial Sequence
  Synthesized molecular recognition unit - light CDR2
SDRNRPS

SEQ ID NO: 1256 - protein, 7 aa, Artificial Sequence
  Synthesized molecular recognition unit - light CDR2
SNYQRPS

SEQ ID NO: 1257 - protein, 7 aa, Artificial Sequence
  Synthesized molecular recognition unit - light CDR2
STNTRSS

SEQ ID NO: 1258 - protein, 7 aa, Artificial Sequence
  Synthesized molecular recognition unit - light CDR2
TASSLQS

SEQ ID NO: 1259 - protein, 7 aa, Artificial Sequence
  Synthesized molecular recognition unit - light CDR2
TLSHRAS

SEQ ID NO: 1260 - protein, 7 aa, Artificial Sequence
  Synthesized molecular recognition unit - light CDR2
YASQSVS

SEQ ID NO: 1261 - protein, 7 aa, Artificial Sequence
  Synthesized molecular recognition unit - light CDR2
YASSLQN

SEQ ID NO: 1262 - protein, 7 aa, Artificial Sequence
  Synthesized molecular recognition unit - light CDR2
YASSLQS

SEQ ID NO: 1263 - protein, 7 aa, Artificial Sequence
  Synthesized molecular recognition unit - light CDR2
YTNTRSS

SEQ ID NO: 1264 - protein, 7 aa, Artificial Sequence
  Synthesized molecular recognition unit - light CDR2
ZASSLQS

SEQ ID NO: 1265 - protein, 14 aa, Artificial Sequence
  Synthesized molecular recognition unit - light CDR3
CAAWDGSLFGHWVF

SEQ ID NO: 1266 - protein, 9 aa, Artificial Sequence
  Synthesized molecular recognition unit - light CDR3
CFSYAGSRF

SEQ ID NO: 1267 - protein, 13 aa, Artificial Sequence [sequence omitted]

SEQ ID NO: 1268 - protein, 11 aa, Artificial Sequence
  Synthesized molecular recognition unit - light CDR3
CHQSGRVPVTF

SEQ ID NO: 1269 - protein, 11 aa, Artificial Sequence [sequence omitted]

SEQ ID NO: 1270 - protein, 11 aa, Artificial Sequence
  Synthesized molecular recognition unit - light CDR3
CIQNTHWPLTR

SEQ ID NO: 1271 - protein, 12 aa, Artificial Sequence
  Synthesized molecular recognition unit - light CDR3
CLLYLGRGIWVF

SEQ ID NO: 1272 - protein, 11 aa, Artificial Sequence [sequence omitted]

SEQ ID NO: 1273 - protein, 11 aa, Artificial Sequence [sequence omitted]

SEQ ID NO: 1274 - protein, 11 aa, Artificial Sequence [sequence omitted]

SEQ ID NO: 1275 - protein, 11 aa, Artificial Sequence [sequence omitted]

SEQ ID NO: 1276 - protein, 10 aa, Artificial Sequence
  Synthesized molecular recognition unit - light CDR3
CLQHKSFPTF

SEQ ID NO: 1277 - protein, 11 aa, Artificial Sequence
  Synthesized molecular recognition unit - light CDR3
CLQHNGYPITF

SEQ ID NO: 1278 - protein, 11 aa, Artificial Sequence
  Synthesized molecular recognition unit - light CDR3
CLQHNSLPFTF

SEQ ID NO: 1279 - protein, 11 aa, Artificial Sequence
  Synthesized molecular recognition unit - light CDR3
CMHGLHPPFTF

SEQ ID NO: 1280 - protein, 11 aa, Artificial Sequence [sequence omitted]

SEQ ID NO: 1281 - protein, 11 aa, Artificial Sequence [sequence omitted]

SEQ ID NO: 1282 - protein, 11 aa, Artificial Sequence [sequence omitted]

SEQ ID NO: 1283 - protein, 11 aa, Artificial Sequence [sequence omitted]

SEQ ID NO: 1284 - protein, 11 aa, Artificial Sequence [sequence omitted]

SEQ ID NO: 1285 - protein, 11 aa, Artificial Sequence [sequence omitted]

SEQ ID NO: 1286 - protein, 11 aa, Artificial Sequence [sequence omitted]

SEQ ID NO: 1287 - protein, 11 aa, Artificial Sequence [sequence omitted]

SEQ ID NO: 1288 - protein, 11 aa, Artificial Sequence [sequence omitted]

SEQ ID NO: 1289 - protein, 11 aa, Artificial Sequence [sequence omitted]

SEQ ID NO: 1290 - protein, 10 aa, Artificial Sequence [sequence omitted]

SEQ ID NO: 1291 - protein, 11 aa, Artificial Sequence [sequence omitted]

SEQ ID NO: 1292 - protein, 11 aa, Artificial Sequence
  Synthesized molecular recognition unit - light CDR3
CMQNTHWPLTL

SEQ ID NO: 1293 - protein, 11 aa, Artificial Sequence
  Synthesized molecular recognition unit - light CDR3
CMQNTHWPLTR

SEQ ID NO: 1294 - protein, 11 aa, Artificial Sequence [sequence omitted]

SEQ ID NO: 1295 - protein, 11 aa, Artificial Sequence [sequence omitted]

SEQ ID NO: 1296 - protein, 11 aa, Artificial Sequence
  Synthesized molecular recognition unit - light CDR3
CMQSLQSPLTF

SEQ ID NO: 1297 - protein, 11 aa, Artificial Sequence [sequence omitted]

SEQ ID NO: 1298 - protein, 11 aa, Artificial Sequence
  Synthesized molecular recognition unit - light CDR3
CMQSSHWPKTF

SEQ ID NO: 1299 - protein, 11 aa, Artificial Sequence
  Synthesized molecular recognition unit - light CDR3
CMQTLKAPLTF

SEQ ID NO: 1300 - protein, 13 aa, Artificial Sequence
  Synthesized molecular recognition unit - light CDR3
CNSRDNSGKHKVF

SEQ ID NO: 1301 - protein, 12 aa, Artificial Sequence [sequence omitted]

SEQ ID NO: 1302 - protein, 11 aa, Artificial Sequence [sequence omitted]

SEQ ID NO: 1303 - protein, 11 aa, Artificial Sequence
  Synthesized molecular recognition unit - light CDR3
CQHLNNFPLTF

SEQ ID NO: 1304 - protein, 13 aa, Artificial Sequence
  Synthesized molecular recognition unit - light CDR3
CQHLNSYPPGDTF

SEQ ID NO: 1305 - protein, 11 aa, Artificial Sequence
  Synthesized molecular recognition unit - light CDR3
CQHRANWPQTF

SEQ ID NO: 1306 - protein, 7 aa, Artificial Sequence
  Synthesized molecular recognition unit - light CDR3
CQHRNFF

SEQ ID NO: 1307 - protein, 11 aa, Artificial Sequence
  Synthesized molecular recognition unit - light CDR3
CQHRTSWPLTF

SEQ ID NO: 1308 - protein, 11 aa, Artificial Sequence [sequence omitted]

SEQ ID NO: 1309 - protein, 11 aa, Artificial Sequence [sequence omitted]

SEQ ID NO: 1310 - protein, 11 aa, Artificial Sequence [sequence omitted]

SEQ ID NO: 1311 - protein, 11 aa, Artificial Sequence [sequence omitted]

SEQ ID NO: 1312 - protein, 11 aa, Artificial Sequence [sequence omitted]

SEQ ID NO: 1313 - protein, 11 aa, Artificial Sequence
  Synthesized molecular recognition unit - light CDR3
CQQADTFPFTF

SEQ ID NO: 1314 - protein, 11 aa, Artificial Sequence
  Synthesized molecular recognition unit - light CDR3
CQQADTFPPTF

SEQ ID NO: 1315 - protein, 11 aa, Artificial Sequence [sequence omitted]

SEQ ID NO: 1316 - protein, 11 aa, Artificial Sequence [sequence omitted]

SEQ ID NO: 1317 - protein, 11 aa, Artificial Sequence [sequence omitted]

SEQ ID NO: 1318 - protein, 11 aa, Artificial Sequence [sequence omitted]

SEQ ID NO: 1319 - protein, 11 aa, Artificial Sequence [sequence omitted]

SEQ ID NO: 1320 - protein, 11 aa, Artificial Sequence [sequence omitted]

SEQ ID NO: 1321 - protein, 11 aa, Artificial Sequence [sequence omitted]

SEQ ID NO: 1322 - protein, 11 aa, Artificial Sequence
  Synthesized molecular recognition unit - light CDR3
CQQANTVPFTF

SEQ ID NO: 1323 - protein, 11 aa, Artificial Sequence
  Synthesized molecular recognition unit - light CDR3
CQQAYSFPQTF

SEQ ID NO: 1324 - protein, 11 aa, Artificial Sequence
  Synthesized molecular recognition unit - light CDR3
CQQAYSFPWTF

SEQ ID NO: 1325 - protein, 11 aa, Artificial Sequence
  Synthesized molecular recognition unit - light CDR3
CQQGFNFPLTF

SEQ ID NO: 1326 - protein, 11 aa, Artificial Sequence [sequence omitted]

SEQ ID NO: 1327 - protein, 11 aa, Artificial Sequence [sequence omitted]

SEQ ID NO: 1328 - protein, 11 aa, Artificial Sequence
  Synthesized molecular recognition unit - light CDR3
CQQGYNIPWTF

SEQ ID NO: 1329 - protein, 11 aa, Artificial Sequence
  Synthesized molecular recognition unit - light CDR3
CQQGYSAPWTF

SEQ ID NO: 1330 - protein, 11 aa, Artificial Sequence [sequence omitted]

SEQ ID NO: 1331 - protein, 11 aa, Artificial Sequence
  Synthesized molecular recognition unit - light CDR3
CQQLSRYPSLF

SEQ ID NO: 1332 - protein, 11 aa, Artificial Sequence
  Synthesized molecular recognition unit - light CDR3
CQQNDYLPLTF

SEQ ID NO: 1333 - protein, 11 aa, Artificial Sequence
  Synthesized molecular recognition unit - light CDR3
CQQNYATPRTF

SEQ ID NO: 1334 - protein, 11 aa, Artificial Sequence [sequence omitted]

SEQ ID NO: 1335 - protein, 11 aa, Artificial Sequence [sequence omitted]

SEQ ID NO: 1336 - protein, 13 aa, Artificial Sequence [sequence omitted]

SEQ ID NO: 1337 - protein, 13 aa, Artificial Sequence
  Synthesized molecular recognition unit - light CDR3
CQQRTNWPPRVTF

SEQ ID NO: 1338 - protein, 10 aa, Artificial Sequence
  Synthesized molecular recognition unit - light CDR3
CQQRYKSYTF

SEQ ID NO: 1339 - protein, 13 aa, Artificial Sequence
  Synthesized molecular recognition unit - light CDR3
CQQRYNWPPSITF

SEQ ID NO: 1340 - protein, 11 aa, Artificial Sequence [sequence omitted]

SEQ ID NO: 1341 - protein, 11 aa, Artificial Sequence
  Synthesized molecular recognition unit - light CDR3
CQQSFIMPLTF

SEQ ID NO: 1342 - protein, 11 aa, Artificial Sequence [sequence omitted]

SEQ ID NO: 1343 - protein, 10 aa, Artificial Sequence [sequence omitted]

SEQ ID NO: 1344 - protein, 11 aa, Artificial Sequence [sequence omitted]

SEQ ID NO: 1345 - protein, 11 aa, Artificial Sequence
  Synthesized molecular recognition unit - light CDR3
CQQSHSPPGTF

SEQ ID NO: 1346 - protein, 11 aa, Artificial Sequence [sequence omitted]

SEQ ID NO: 1347 - protein, 10 aa, Artificial Sequence
  Synthesized molecular recognition unit - light CDR3
CQQSSRFWTF

SEQ ID NO: 1348 - protein, 11 aa, Artificial Sequence [sequence omitted]

SEQ ID NO: 1349 - protein, 11 aa, Artificial Sequence [sequence omitted]

SEQ ID NO: 1350 - protein, 11 aa, Artificial Sequence [sequence omitted]

SEQ ID NO: 1351 - protein, 11 aa, Artificial Sequence [sequence omitted]

SEQ ID NO: 1352 - protein, 11 aa, Artificial Sequence [sequence omitted]

SEQ ID NO: 1353 - protein, 11 aa, Artificial Sequence [sequence omitted]

SEQ ID NO: 1354 - protein, 11 aa, Artificial Sequence [sequence omitted]

SEQ ID NO: 1355 - protein, 11 aa, Artificial Sequence [sequence omitted]

SEQ ID NO: 1356 - protein, 11 aa, Artificial Sequence [sequence omitted]

SEQ ID NO: 1357 - protein, 12 aa, Artificial Sequence
  Synthesized molecular recognition unit - light CDR3
CQQSYSHTAFTF

SEQ ID NO: 1358 - protein, 11 aa, Artificial Sequence [sequence omitted]

SEQ ID NO: 1359 - protein, 10 aa, Artificial Sequence [sequence omitted]

SEQ ID NO: 1360 - protein, 11 aa, Artificial Sequence [sequence omitted]

SEQ ID NO: 1361 - protein, 11 aa, Artificial Sequence [sequence omitted]

SEQ ID NO: 1362 - protein, 11 aa, Artificial Sequence [sequence omitted]

SEQ ID NO: 1363 - protein, 11 aa, Artificial Sequence [sequence omitted]

SEQ ID NO: 1364 - protein, 12 aa, Artificial Sequence [sequence omitted]

SEQ ID NO: 1365 - protein, 11 aa, Artificial Sequence [sequence omitted]

SEQ ID NO: 1366 - protein, 11 aa, Artificial Sequence [sequence omitted]

SEQ ID NO: 1367 - protein, 12 aa, Artificial Sequence [sequence omitted]

SEQ ID NO: 1368 - protein, 11 aa, Artificial Sequence [sequence omitted]

SEQ ID NO: 1369 - protein, 11 aa, Artificial Sequence [sequence omitted]

SEQ ID NO: 1370 - protein, 11 aa, Artificial Sequence [sequence omitted]

SEQ ID NO: 1371 - protein, 12 aa, Artificial Sequence [sequence omitted]

SEQ ID NO: 1372 - protein, 11 aa, Artificial Sequence [sequence omitted]

SEQ ID NO: 1373 - protein, 11 aa, Artificial Sequence
  Synthesized molecular recognition unit - light CDR3
CQQSYSTPRTF

SEQ ID NO: 1374 - protein, 12 aa, Artificial Sequence [sequence omitted]

SEQ ID NO: 1375 - protein, 10 aa, Artificial Sequence [sequence omitted]

SEQ ID NO: 1376 - protein, 10 aa, Artificial Sequence [sequence omitted]

SEQ ID NO: 1377 - protein, 11 aa, Artificial Sequence [sequence omitted]

SEQ ID NO: 1378 - protein, 11 aa, Artificial Sequence [sequence omitted]

SEQ ID NO: 1379 - protein, 11 aa, Artificial Sequence [sequence omitted]

SEQ ID NO: 1380 - protein, 11 aa, Artificial Sequence [sequence omitted]

SEQ ID NO: 1381 - protein, 13 aa, Artificial Sequence
  Synthesized molecular recognition unit - light CDR3
CQQSYTSTPLNSF

SEQ ID NO: 1382 - protein, 11 aa, Artificial Sequence [sequence omitted]

SEQ ID NO: 1383 - protein, 11 aa, Artificial Sequence
  Synthesized molecular recognition unit - light CDR3
CQQTFSPPLTF

SEQ ID NO: 1384 - protein, 11 aa, Artificial Sequence
  Synthesized molecular recognition unit - light CDR3
CQQTFSVPWTF

SEQ ID NO: 1385 - protein, 11 aa, Artificial Sequence
  Synthesized molecular recognition unit - light CDR3
CQQTNLFPYTF

SEQ ID NO: 1386 - protein, 11 aa, Artificial Sequence
  Synthesized molecular recognition unit - light CDR3
CQQTNTFPFTF

SEQ ID NO: 1387 - protein, 11 aa, Artificial Sequence [sequence omitted]

SEQ ID NO: 1388 - protein, 11 aa, Artificial Sequence
  Synthesized molecular recognition unit - light CDR3
CQQTYNIPITF

SEQ ID NO: 1389 - protein, 11 aa, Artificial Sequence
  Synthesized molecular recognition unit - light CDR3
CQQTYNPPRTF

SEQ ID NO: 1390 - protein, 11 aa, Artificial Sequence [sequence omitted]

SEQ ID NO: 1391 - protein, 11 aa, Artificial Sequence [sequence omitted]

SEQ ID NO: 1392 - protein, 11 aa, Artificial Sequence
  Synthesized molecular recognition unit - light CDR3
CQQTYSMPITF

SEQ ID NO: 1393 - protein, 11 aa, Artificial Sequence [sequence omitted]

SEQ ID NO: 1394 - protein, 11 aa, Artificial Sequence [sequence omitted]

SEQ ID NO: 1395 - protein, 11 aa, Artificial Sequence [sequence omitted]

SEQ ID NO: 1396 - protein, 11 aa, Artificial Sequence [sequence omitted]

SEQ ID NO: 1397 - protein, 11 aa, Artificial Sequence [sequence omitted]

SEQ ID NO: 1398 - protein, 10 aa, Artificial Sequence [sequence omitted]

SEQ ID NO: 1399 - protein, 11 aa, Artificial Sequence [sequence omitted]

SEQ ID NO: 1400 - protein, 10 aa, Artificial Sequence
  Synthesized molecular recognition unit - light CDR3
CQQYAISYTF

SEQ ID NO: 1401 - protein, 11 aa, Artificial Sequence [sequence omitted]

SEQ ID NO: 1402 - protein, 11 aa, Artificial Sequence
  Synthesized molecular recognition unit - light CDR3
CQQYDSWPPTF

SEQ ID NO: 1403 - protein, 11 aa, Artificial Sequence
  Synthesized molecular recognition unit - light CDR3
CQQYDTPLRTF

SEQ ID NO: 1404 - protein, 11 aa, Artificial Sequence [sequence omitted]

SEQ ID NO: 1405 - protein, 12 aa, Artificial Sequence
  Synthesized molecular recognition unit - light CDR3
CQQYETWPVLTF

SEQ ID NO: 1406 - protein, 11 aa, Artificial Sequence [sequence omitted]

SEQ ID NO: 1407 - protein, 10 aa, Artificial Sequence
  Synthesized molecular recognition unit - light CDR3
CQQYGIAPTF

SEQ ID NO: 1408 - protein, 11 aa, Artificial Sequence [sequence omitted]

SEQ ID NO: 1409 - protein, 12 aa, Artificial Sequence [sequence omitted]

SEQ ID NO: 1410 - protein, 11 aa, Artificial Sequence [sequence omitted]

SEQ ID NO: 1411 - protein, 10 aa, Artificial Sequence [sequence omitted]

SEQ ID NO: 1412 - protein, 11 aa, Artificial Sequence [sequence omitted]

SEQ ID NO: 1413 - protein, 11 aa, Artificial Sequence [sequence omitted]

SEQ ID NO: 1414 - protein, 11 aa, Artificial Sequence [sequence omitted]

SEQ ID NO: 1415 - protein, 10 aa, Artificial Sequence [sequence omitted]

SEQ ID NO: 1416 - protein, 11 aa, Artificial Sequence [sequence omitted]

SEQ ID NO: 1417 - protein, 13 aa, Artificial Sequence
  Synthesized molecular recognition unit - light CDR3
CQQYNHWPPLFTF

SEQ ID NO: 1418 - protein, 11 aa, Artificial Sequence [sequence omitted]

SEQ ID NO: 1419 - protein, 10 aa, Artificial Sequence
  Synthesized molecular recognition unit - light CDR3
CQQYNKSPSF

SEQ ID NO: 1420 - protein, 13 aa, Artificial Sequence [sequence omitted]

SEQ ID NO: 1421 - protein, 11 aa, Artificial Sequence [sequence omitted]

SEQ ID NO: 1422 - protein, 11 aa, Artificial Sequence [sequence omitted]

SEQ ID NO: 1423 - protein, 11 aa, Artificial Sequence [sequence omitted]

SEQ ID NO: 1424 - protein, 11 aa, Artificial Sequence [sequence omitted]

SEQ ID NO: 1425 - protein, 11 aa, Artificial Sequence
  Synthesized molecular recognition unit - light CDR3
CQQYSSYPYTI

SEQ ID NO: 1426 - protein, 11 aa, Artificial Sequence
  Synthesized molecular recognition unit - light CDR3
CQQYVSYPLTF

SEQ ID NO: 1427 - protein, 11 aa, Artificial Sequence
  Synthesized molecular recognition unit - light CDR3
CQQYYSYPWTS

SEQ ID NO: 1428 - protein, 11 aa, Artificial Sequence [sequence omitted]

SEQ ID NO: 1429 - protein, 13 aa, Artificial Sequence [sequence omitted]

SEQ ID NO: 1430 - protein, 12 aa, Artificial Sequence
  Synthesized molecular recognition unit - light CDR3
CQSYDYDHRWVF

SEQ ID NO: 1431 - protein, 11 aa, Artificial Sequence [sequence omitted]

SEQ ID NO: 1432 - protein, 13 aa, Artificial Sequence [sequence omitted]

SEQ ID NO: 1433 - protein, 11 aa, Artificial Sequence
  Synthesized molecular recognition unit - light CDR3
CTQTVQFPITF

SEQ ID NO: 1434 - protein, 11 aa, Artificial Sequence
  Synthesized molecular recognition unit - light CDR3
CVQTTQSPLTF

SEQ ID NO: 1435 - protein, 9 aa, Artificial Sequence
  Synthesized molecular recognition unit - light CDR3
SSFAGNSLE

SEQ ID NO: 1436 - protein, 9 aa, Artificial Sequence
  Synthesized molecular recognition unit - light CDR3
QSYANTLSL

SEQ ID NO: 1437 - protein, 9 aa, Artificial Sequence
  Synthesized molecular recognition unit - heavy CDR1
FSFSSHAMS

SEQ ID NO: 1438 - protein, 9 aa, Artificial Sequence
  Synthesized molecular recognition unit - heavy CDR1
FTFSDYYMS

SEQ ID NO: 1439 - protein, 10 aa, Artificial Sequence
  Synthesized molecular recognition unit - heavy CDR1
GYTFTNYDIN

SEQ ID NO: 1440 - protein, 9 aa, Artificial Sequence
  Synthesized molecular recognition unit - heavy CDR1
HTFTSHYMH

SEQ ID NO: 1441 - protein, 9 aa, Artificial Sequence
  Synthesized molecular recognition unit - heavy CDR1
YMFTGHDMH

SEQ ID NO: 1442 - protein, 9 aa, Artificial Sequence
  Synthesized molecular recognition unit - heavy CDR1
YSFTGYYLH

SEQ ID NO: 1443 - protein, 9 aa, Artificial Sequence
  Synthesized molecular recognition unit - heavy CDR1
YSFTNYYMH

SEQ ID NO: 1444 - protein, 9 aa, Artificial Sequence
  Synthesized molecular recognition unit - heavy CDR1
YTFAKYYIH

SEQ ID NO: 1445 - protein, 9 aa, Artificial Sequence
  Synthesized molecular recognition unit - heavy CDR1
YTFNGYYMH

SEQ ID NO: 1446 - protein, 9 aa, Artificial Sequence
  Synthesized molecular recognition unit - heavy CDR1
YTFSRHYIH

SEQ ID NO: 1447 - protein, 9 aa, Artificial Sequence
  Synthesized molecular recognition unit - heavy CDR1
YTFTDHYFH

SEQ ID NO: 1448 - protein, 9 aa, Artificial Sequence
  Synthesized molecular recognition unit - heavy CDR1
YTFTDSYIH

SEQ ID NO: 1449 - protein, 9 aa, Artificial Sequence
  Synthesized molecular recognition unit - heavy CDR1
YTFTDYYMH

SEQ ID NO: 1450 - protein, 9 aa, Artificial Sequence
  Synthesized molecular recognition unit - heavy CDR1
YTFTGYYIH

SEQ ID NO: 1451 - protein, 9 aa, Artificial Sequence
  Synthesized molecular recognition unit - heavy CDR1
YTFTNYYMH

SEQ ID NO: 1452 - protein, 9 aa, Artificial Sequence
  Synthesized molecular recognition unit - heavy CDR1
YTFTRYYIH

SEQ ID NO: 1453 - protein, 9 aa, Artificial Sequence
  Synthesized molecular recognition unit - heavy CDR1
YTFTRYYLH

SEQ ID NO: 1454 - protein, 9 aa, Artificial Sequence
  Synthesized molecular recognition unit - heavy CDR1
YTFTSSYIH

SEQ ID NO: 1455 - protein, 9 aa, Artificial Sequence
  Synthesized molecular recognition unit - heavy CDR1
YWFTASYMH

SEQ ID NO: 1456 - protein, 9 aa, Artificial Sequence
  Synthesized molecular recognition unit - heavy CDR1
GTFSSYAIT

SEQ ID NO: 1457 - protein, 9 aa, Artificial Sequence
  Synthesized molecular recognition unit - heavy CDR1
GTFSSYGIS

SEQ ID NO: 1458 - protein, 13 aa, Artificial Sequence
  Synthesized molecular recognition unit - heavy CDR2
GDIIPIFGSANYA

SEQ ID NO: 1459 - protein, 13 aa, Artificial Sequence
  Synthesized molecular recognition unit - heavy CDR2
GIINPSGGGAVYA

SEQ ID NO: 1460 - protein, 13 aa, Artificial Sequence
  Synthesized molecular recognition unit - heavy CDR2
GIVNPSGGGTNYA

SEQ ID NO: 1461 - protein, 13 aa, Artificial Sequence
  Synthesized molecular recognition unit - heavy CDR2
GRINPHNGNTNYA

SEQ ID NO: 1462 - protein, 13 aa, Artificial Sequence
  Synthesized molecular recognition unit - heavy CDR2
GWANPSSGNTGTA

SEQ ID NO: 1463 - protein, 13 aa, Artificial Sequence
  Synthesized molecular recognition unit - heavy CDR2
GWINPNSGNTGYA

SEQ ID NO: 1464 - protein, 13 aa, Artificial Sequence
  Synthesized molecular recognition unit - heavy CDR2
GWMDPNSGYTGYA

SEQ ID NO: 1465 - protein, 13 aa, Artificial Sequence
  Synthesized molecular recognition unit - heavy CDR2
GWMKPDSGNTGYA

SEQ ID NO: 1466 - protein, 13 aa, Artificial Sequence
  Synthesized molecular recognition unit - heavy CDR2
GWMNPNSANAGYA

SEQ ID NO: 1467 - protein, 13 aa, Artificial Sequence
  Synthesized molecular recognition unit - heavy CDR2
GWMNPNSGSTGYA

SEQ ID NO: 1468 - protein, 13 aa, Artificial Sequence
  Synthesized molecular recognition unit - heavy CDR2
SAISGSGHSTYYA

SEQ ID NO: 1469 - protein, 17 aa, Artificial Sequence
  Synthesized molecular recognition unit - heavy CDR2
WIYPRDGSTKYNEKFKG

SEQ ID NO: 1470 - protein, 8 aa, Artificial Sequence
  Synthesized molecular recognition unit - heavy CDR3
CANPKHYW

SEQ ID NO: 1471 - protein, 19 aa, Artificial Sequence
  Synthesized molecular recognition unit - heavy CDR3
CARANRGLRKNYYYGMDVW

SEQ ID NO: 1472 - protein, 18 aa, Artificial Sequence
  Synthesized molecular recognition unit - heavy CDR3
CARATRVSAAGTVHFQHW

SEQ ID NO: 1473 - protein, 24 aa, Artificial Sequence
  Synthesized molecular recognition unit - heavy CDR3
CARDHGTMIAVAGTFDYYYYMDVW

SEQ ID NO: 1474 - protein, 16 aa, Artificial Sequence
  Synthesized molecular recognition unit - heavy CDR3
CAREDDFWSGGGMDVW

SEQ ID NO: 1475 - protein, 15 aa, Artificial Sequence
  Synthesized molecular recognition unit - heavy CDR3
CAREGLRGWSIFDIW

SEQ ID NO: 1476 - protein, 13 aa, Artificial Sequence
  Synthesized molecular recognition unit - heavy CDR3
CARELGLGWFDPW

SEQ ID NO: 1477 - protein, 14 aa, Artificial Sequence
  Synthesized molecular recognition unit - heavy CDR3
CARGDINYGNFDYW

SEQ ID NO: 1478 - protein, 24 aa, Artificial Sequence
  Synthesized molecular recognition unit - heavy CDR3
CARGDIVATMGMKKVDYYYYMDVW

SEQ ID NO: 1479 - protein, 17 aa, Artificial Sequence
  Synthesized molecular recognition unit - heavy CDR3
CARGGHTGYSSGWYNHW

SEQ ID NO: 1480 - protein, 19 aa, Artificial Sequence
  Synthesized molecular recognition unit - heavy CDR3
CARGGNYGRWLQPWYFDLW

SEQ ID NO: 1481 - protein, 8 aa, Artificial Sequence [sequence omitted]

SEQ ID NO: 1482 - protein, 19 aa, Artificial Sequence
  Synthesized molecular recognition unit - heavy CDR3
CARGIHGDYGLDYYYMDVW

SEQ ID NO: 1483 - protein, 11 aa, Artificial Sequence [sequence omitted]

SEQ ID NO: 1484 - protein, 8 aa, Artificial Sequence
  Synthesized molecular recognition unit - heavy CDR3
CARGMEYW

SEQ ID NO: 1485 - protein, 20 aa, Artificial Sequence
  Synthesized molecular recognition unit - heavy CDR3
CARGPADFWSGYKNDYFDFW

SEQ ID NO: 1486 - protein, 11 aa, Artificial Sequence [sequence omitted]

SEQ ID NO: 1487 - protein, 15 aa, Artificial Sequence
  Synthesized molecular recognition unit - heavy CDR3
CARHKRHTPYAFDIW

SEQ ID NO: 1488 - protein, 15 aa, Artificial Sequence
  Synthesized molecular recognition unit - heavy CDR3
CARQGGSYSMGLDPW

SEQ ID NO: 1489 - protein, 15 aa, Artificial Sequence
  Synthesized molecular recognition unit - heavy CDR3
CARRSSSWGWYFDLW

SEQ ID NO: 1490 - protein, 17 aa, Artificial Sequence
  Synthesized molecular recognition unit - heavy CDR3
CARSPDFWSGEGYFDLW

SEQ ID NO: 1491 - protein, 15 aa, Artificial Sequence
  Synthesized molecular recognition unit - heavy CDR3
CARSRLRWDWYFDLW

SEQ ID NO: 1492 - protein, 15 aa, Artificial Sequence
  Synthesized molecular recognition unit - heavy CDR3
CARSYYGVIDAFDIW

SEQ ID NO: 1493 - protein, 17 aa, Artificial Sequence
  Synthesized molecular recognition unit - heavy CDR3
CARVGDYDRFNWYFDLW

SEQ ID NO: 1494 - protein, 13 aa, Artificial Sequence
  Synthesized molecular recognition unit - heavy CDR3
CARVRFLEEMDVW

SEQ ID NO: 1495 - protein, 16 aa, Artificial Sequence
  Synthesized molecular recognition unit - heavy CDR3
CARWTTVVTGAAFDIW

SEQ ID NO: 1496 - protein, 10 aa, Artificial Sequence
  Synthesized molecular recognition unit - heavy CDR3
CVRSAWGFAY

SEQ ID NO: 1497 - protein, 11 aa, Artificial Sequence
  Synthesized molecular recognition unit - light CDR1
KASQDVGTAVA

SEQ ID NO: 1498 - protein, 17 aa, Artificial Sequence
  Synthesized molecular recognition unit - light CDR1
KSSQSVLHSSNNKNYLA

SEQ ID NO: 1499 - protein, 11 aa, Artificial Sequence
  Synthesized molecular recognition unit - light CDR1
RASQAIGRRLA

SEQ ID NO: 1500 - protein, 11 aa, Artificial Sequence
  Synthesized molecular recognition unit - light CDR1
RASQDISNNLN

SEQ ID NO: 1501 - protein, 11 aa, Artificial Sequence
  Synthesized molecular recognition unit - light CDR1
RASQDISRGLG

SEQ ID NO: 1502 - protein, 11 aa, Artificial Sequence
  Synthesized molecular recognition unit - light CDR1
RASQGIRNDLN

SEQ ID NO: 1503 - protein, 11 aa, Artificial Sequence
  Synthesized molecular recognition unit - light CDR1
RASQGISKYLA

SEQ ID NO: 1504 - protein, 11 aa, Artificial Sequence
  Synthesized molecular recognition unit - light CDR1
RASQGISSWLA

SEQ ID NO: 1505 - protein, 11 aa, Artificial Sequence
  Synthesized molecular recognition unit - light CDR1
RASQGVSTYLA

SEQ ID NO: 1506 - protein, 11 aa, Artificial Sequence
  Synthesized molecular recognition unit - light CDR1
RASQNINSWLA

SEQ ID NO: 1507 - protein, 11 aa, Artificial Sequence
  Synthesized molecular recognition unit - light CDR1
RASQSIARYLN

SEQ ID NO: 1508 - protein, 11 aa, Artificial Sequence
  Synthesized molecular recognition unit - light CDR1
RASQSIGNYLN

SEQ ID NO: 1509 - protein, 11 aa, Artificial Sequence
  Synthesized molecular recognition unit - light CDR1
RASQSIISYLN

SEQ ID NO: 1510 - protein, 11 aa, Artificial Sequence
  Synthesized molecular recognition unit - light CDR1
RASQSISKWLA

SEQ ID NO: 1511 - protein, 11 aa, Artificial Sequence
  Synthesized molecular recognition unit - light CDR1
RASQSITTYLN

SEQ ID NO: 1512 - protein, 11 aa, Artificial Sequence
  Synthesized molecular recognition unit - light CDR1
RASQSLSSWLA

SEQ ID NO: 1513 - protein, 11 aa, Artificial Sequence
  Synthesized molecular recognition unit - light CDR1
RASQTISSYLN

SEQ ID NO: 1514 - protein, 11 aa, Artificial Sequence
  Synthesized molecular recognition unit - light CDR1
RASRTVYNFLA

SEQ ID NO: 1515 - protein, 7 aa, Artificial Sequence
  Synthesized molecular recognition unit - light CDR2
AASRLQT

SEQ ID NO: 1516 - protein, 7 aa, Artificial Sequence
  Synthesized molecular recognition unit - light CDR2
AASSLQT

SEQ ID NO: 1517 - protein, 7 aa, Artificial Sequence
  Synthesized molecular recognition unit - light CDR2
AASTLYR

SEQ ID NO: 1518 - protein, 7 aa, Artificial Sequence
  Synthesized molecular recognition unit - light CDR2
DASNLGT

SEQ ID NO: 1519 - protein, 7 aa, Artificial Sequence
  Synthesized molecular recognition unit - light CDR2
DASNLRT

SEQ ID NO: 1520 - protein, 7 aa, Artificial Sequence
  Synthesized molecular recognition unit - light CDR2
DASTLQS

SEQ ID NO: 1521 - protein, 7 aa, Artificial Sequence
  Synthesized molecular recognition unit - light CDR2
GASALRS

SEQ ID NO: 1522 - protein, 7 aa, Artificial Sequence
  Synthesized molecular recognition unit - light CDR2
GASHLQT

SEQ ID NO: 1523 - protein, 7 aa, Artificial Sequence
  Synthesized molecular recognition unit - light CDR2
KASTLHN

SEQ ID NO: 1524 - protein, 7 aa, Artificial Sequence
  Synthesized molecular recognition unit - light CDR2
KTSSLQS

SEQ ID NO: 1525 - protein, 7 aa, Artificial Sequence
  Synthesized molecular recognition unit - light CDR2
LGSSRAS

SEQ ID NO: 1526 - protein, 7 aa, Artificial Sequence
  Synthesized molecular recognition unit - light CDR2
WASTRES

SEQ ID NO: 1527 - protein, 7 aa, Artificial Sequence
  Synthesized molecular recognition unit - light CDR2
WASTRHT

SEQ ID NO: 1528 - protein, 11 aa, Artificial Sequence [sequence omitted]

SEQ ID NO: 1529 - protein, 11 aa, Artificial Sequence
  Synthesized molecular recognition unit - light CDR3
CQQAFRFPPTF

SEQ ID NO: 1530 - protein, 11 aa, Artificial Sequence [sequence omitted]

SEQ ID NO: 1531 - protein, 11 aa, Artificial Sequence [sequence omitted]

SEQ ID NO: 1532 - protein, 11 aa, Artificial Sequence
  Synthesized molecular recognition unit - light CDR3
CQQSFRLPLTF

SEQ ID NO: 1533 - protein, 11 aa, Artificial Sequence [sequence omitted]

SEQ ID NO: 1534 - protein, 11 aa, Artificial Sequence
  Synthesized molecular recognition unit - light CDR3
CQQSSRIPPTF

SEQ ID NO: 1535 - protein, 11 aa, Artificial Sequence
  Synthesized molecular recognition unit - light CDR3
CQQSWRFPYTF

SEQ ID NO: 1536 - protein, 11 aa, Artificial Sequence [sequence omitted]

SEQ ID NO: 1537 - protein, 11 aa, Artificial Sequence
  Synthesized molecular recognition unit - light CDR3
CQQSYSTPPTF

SEQ ID NO: 1538 - protein, 11 aa, Artificial Sequence [sequence omitted]

SEQ ID NO: 1539 - protein, 11 aa, Artificial Sequence [sequence omitted]

SEQ ID NO: 1540 - protein, 11 aa, Artificial Sequence [sequence omitted]

SEQ ID NO: 1541 - protein, 10 aa, Artificial Sequence [sequence omitted]

SEQ ID NO: 1542 - protein, 11 aa, Artificial Sequence [sequence omitted]

SEQ ID NO: 1543 - protein, 11 aa, Artificial Sequence [sequence omitted]

SEQ ID NO: 1544 - protein, 11 aa, Artificial Sequence [sequence omitted]

SEQ ID NO: 1545 - protein, 11 aa, Artificial Sequence [sequence omitted]

SEQ ID NO: 1546 - protein, 9 aa, Artificial Sequence
  Synthesized molecular recognition unit - light CDR3
QQYSTYPLT

SEQ ID NO: 1547 - protein, 9 aa, Artificial Sequence
  Synthesized molecular recognition unit - heavy CDR1
DTFANYGFS

SEQ ID NO: 1548 - protein, 9 aa, Artificial Sequence
  Synthesized molecular recognition unit - heavy CDR1
FAFKDYYMT

SEQ ID NO: 1549 - protein, 9 aa, Artificial Sequence
  Synthesized molecular recognition unit - heavy CDR1
FAFSTTAMS

SEQ ID NO: 1550 - protein, 9 aa, Artificial Sequence
  Synthesized molecular recognition unit - heavy CDR1
FALSGYYMS

SEQ ID NO: 1551 - protein, 9 aa, Artificial Sequence
  Synthesized molecular recognition unit - heavy CDR1
FPFRYYGMS

SEQ ID NO: 1552 - protein, 9 aa, Artificial Sequence
  Synthesized molecular recognition unit - heavy CDR1
FPFZYYSMN

SEQ ID NO: 1553 - protein, 9 aa, Artificial Sequence
  Synthesized molecular recognition unit - heavy CDR1
FRFSISTMG

SEQ ID NO: 1554 - protein, 9 aa, Artificial Sequence
  Synthesized molecular recognition unit - heavy CDR1
FSFDDYGMS

SEQ ID NO: 1555 - protein, 9 aa, Artificial Sequence
  Synthesized molecular recognition unit - heavy CDR1
FSFETYGMS

SEQ ID NO: 1556 - protein, 9 aa, Artificial Sequence
  Synthesized molecular recognition unit - heavy CDR1
FSFNTFGIH

SEQ ID NO: 1557 - protein, 9 aa, Artificial Sequence
  Synthesized molecular recognition unit - heavy CDR1
FSFNTYAMN

SEQ ID NO: 1558 - protein, 9 aa, Artificial Sequence
  Synthesized molecular recognition unit - heavy CDR1
FSFSDYYMS

SEQ ID NO: 1559 - protein, 9 aa, Artificial Sequence
  Synthesized molecular recognition unit - heavy CDR1
FSFSSYSMN

SEQ ID NO: 1560 - protein, 9 aa, Artificial Sequence
  Synthesized molecular recognition unit - heavy CDR1
FTFDAYAMH

SEQ ID NO: 1561 - protein, 9 aa, Artificial Sequence
  Synthesized molecular recognition unit - heavy CDR1
FTFDDYGMS

SEQ ID NO: 1562 - protein, 9 aa, Artificial Sequence
  Synthesized molecular recognition unit - heavy CDR1
FTFDEYAMH

SEQ ID NO: 1563 - protein, 9 aa, Artificial Sequence
  Synthesized molecular recognition unit - heavy CDR1
FTFNSYSMD

SEQ ID NO: 1564 - protein, 9 aa, Artificial Sequence
  Synthesized molecular recognition unit - heavy CDR1
FTFRNYAIH

SEQ ID NO: 1565 - protein, 9 aa, Artificial Sequence
  Synthesized molecular recognition unit - heavy CDR1
FTFSAHGMH

SEQ ID NO: 1566 - protein, 9 aa, Artificial Sequence
  Synthesized molecular recognition unit - heavy CDR1
FTFSDFAMT

SEQ ID NO: 1567 - protein, 9 aa, Artificial Sequence
  Synthesized molecular recognition unit - heavy CDR1
FTFSDHYMS

SEQ ID NO: 1568 - protein, 9 aa, Artificial Sequence
  Synthesized molecular recognition unit - heavy CDR1
FTFSDYYMS

SEQ ID NO: 1569 - protein, 9 aa, Artificial Sequence
  Synthesized molecular recognition unit - heavy CDR1
FTFSKTDMH

SEQ ID NO: 1570 - protein, 9 aa, Artificial Sequence
  Synthesized molecular recognition unit - heavy CDR1
FTFSNSDMN

SEQ ID NO: 1571 - protein, 9 aa, Artificial Sequence
  Synthesized molecular recognition unit - heavy CDR1
FTFSNYWIH

SEQ ID NO: 1572 - protein, 9 aa, Artificial Sequence
  Synthesized molecular recognition unit - heavy CDR1
FTFSRHSMN

SEQ ID NO: 1573 - protein, 9 aa, Artificial Sequence
  Synthesized molecular recognition unit - heavy CDR1
FTFSSHSTH

SEQ ID NO: 1574 - protein, 9 aa, Artificial Sequence
  Synthesized molecular recognition unit - heavy CDR1
FTFSSSAMH

SEQ ID NO: 1575 - protein, 9 aa, Artificial Sequence
  Synthesized molecular recognition unit - heavy CDR1
FTFSSSWMH

SEQ ID NO: 1576 - protein, 9 aa, Artificial Sequence
  Synthesized molecular recognition unit - heavy CDR1
FTFSSYAMH

SEQ ID NO: 1577 - protein, 9 aa, Artificial Sequence
  Synthesized molecular recognition unit - heavy CDR1
FTFSSYAMS

SEQ ID NO: 1578 - protein, 9 aa, Artificial Sequence
  Synthesized molecular recognition unit - heavy CDR1
FTFSSYDMH

SEQ ID NO: 1579 - protein, 9 aa, Artificial Sequence
  Synthesized molecular recognition unit - heavy CDR1
FTFSSYSMN

SEQ ID NO: 1580 - protein, 9 aa, Artificial Sequence
  Synthesized molecular recognition unit - heavy CDR1
FTFSSYWMH

SEQ ID NO: 1581 - protein, 9 aa, Artificial Sequence
  Synthesized molecular recognition unit - heavy CDR1
FTFSSZZMH

SEQ ID NO: 1582 - protein, 9 aa, Artificial Sequence
  Synthesized molecular recognition unit - heavy CDR1
FTFSTFGMH

SEQ ID NO: 1583 - protein, 9 aa, Artificial Sequence
  Synthesized molecular recognition unit - heavy CDR1
FTFSTHAFH

SEQ ID NO: 1584 - protein, 9 aa, Artificial Sequence
  Synthesized molecular recognition unit - heavy CDR1
FTFSTYGMH

SEQ ID NO: 1585 - protein, 9 aa, Artificial Sequence
  Synthesized molecular recognition unit - heavy CDR1
FTFSTYSMN

SEQ ID NO: 1586 - protein, 9 aa, Artificial Sequence
  Synthesized molecular recognition unit - heavy CDR1
FTFSTYYMS

SEQ ID NO: 1587 - protein, 9 aa, Artificial Sequence
  Synthesized molecular recognition unit - heavy CDR1
FTFTDYGLH

SEQ ID NO: 1588 - protein, 9 aa, Artificial Sequence
  Synthesized molecular recognition unit - heavy CDR1
FTFTSSAMQ

SEQ ID NO: 1589 - protein, 9 aa, Artificial Sequence
  Synthesized molecular recognition unit - heavy CDR1
FTFTSSAVQ

SEQ ID NO: 1590 - protein, 9 aa, Artificial Sequence
  Synthesized molecular recognition unit - heavy CDR1
FTFZNAWMS

SEQ ID NO: 1591 - protein, 9 aa, Artificial Sequence
  Synthesized molecular recognition unit - heavy CDR1
FTLRNHWLS

SEQ ID NO: 1592 - protein, 9 aa, Artificial Sequence
  Synthesized molecular recognition unit - heavy CDR1
FTVSSNYMS

SEQ ID NO: 1593 - protein, 9 aa, Artificial Sequence
  Synthesized molecular recognition unit - heavy CDR1
GDLSIYTIN

SEQ ID NO: 1594 - protein, 9 aa, Artificial Sequence
  Synthesized molecular recognition unit - heavy CDR1
GSFSDYYWS

SEQ ID NO: 1595 - protein, 9 aa, Artificial Sequence
  Synthesized molecular recognition unit - heavy CDR1
GSFSGYYWT

SEQ ID NO: 1596 - protein, 9 aa, Artificial Sequence
  Synthesized molecular recognition unit - heavy CDR1
GSLSGYYWS

SEQ ID NO: 1597 - protein, 9 aa, Artificial Sequence
  Synthesized molecular recognition unit - heavy CDR1
GTFHTYGLS

SEQ ID NO: 1598 - protein, 9 aa, Artificial Sequence
  Synthesized molecular recognition unit - heavy CDR1
GTFNSNAIS

SEQ ID NO: 1599 - protein, 9 aa, Artificial Sequence
  Synthesized molecular recognition unit - heavy CDR1
GTFNTHTIT

SEQ ID NO: 1600 - protein, 9 aa, Artificial Sequence
  Synthesized molecular recognition unit - heavy CDR1
GTFSHYTIS

SEQ ID NO: 1601 - protein, 9 aa, Artificial Sequence
  Synthesized molecular recognition unit - heavy CDR1
GTFSRYHMG

SEQ ID NO: 1602 - protein, 9 aa, Artificial Sequence
  Synthesized molecular recognition unit - heavy CDR1
GTFSSHAIN

SEQ ID NO: 1603 - protein, 9 aa, Artificial Sequence
  Synthesized molecular recognition unit - heavy CDR1
GTFSSYAIS

SEQ ID NO: 1604 - protein, 9 aa, Artificial Sequence
  Synthesized molecular recognition unit - heavy CDR1
GTFSZYAIS

SEQ ID NO: 1605 - protein, 9 aa, Artificial Sequence
  Synthesized molecular recognition unit - heavy CDR1
GTISDYTVS

SEQ ID NO: 1606 - protein, 9 aa, Artificial Sequence
  Synthesized molecular recognition unit - heavy CDR1
HTFLTYDIN

SEQ ID NO: 1607 - protein, 9 aa, Artificial Sequence
  Synthesized molecular recognition unit - heavy CDR1
HTFSSYAMG

SEQ ID NO: 1608 - protein, 9 aa, Artificial Sequence
  Synthesized molecular recognition unit - heavy CDR1
IAFRYYDMG

SEQ ID NO: 1609 - protein, 8 aa, Artificial Sequence
  Synthesized molecular recognition unit - heavy CDR1
ISSVYGMG

SEQ ID NO: 1610 - protein, 9 aa, Artificial Sequence
  Synthesized molecular recognition unit - heavy CDR1
LPFSRYAMA

SEQ ID NO: 1611 - protein, 9 aa, Artificial Sequence
  Synthesized molecular recognition unit - heavy CDR1
LSFSSYAMG

SEQ ID NO: 1612 - protein, 13 aa, Artificial Sequence
  Synthesized molecular recognition unit - heavy CDR1
LSSGRPFSSYVMG

SEQ ID NO: 1613 - protein, 9 aa, Artificial Sequence
  Synthesized molecular recognition unit - heavy CDR1
LTFDDHAMH

SEQ ID NO: 1614 - protein, 9 aa, Artificial Sequence
  Synthesized molecular recognition unit - heavy CDR1
LTFSNAAMA

SEQ ID NO: 1615 - protein, 9 aa, Artificial Sequence
  Synthesized molecular recognition unit - heavy CDR1
LTFTSHGMS

SEQ ID NO: 1616 - protein, 9 aa, Artificial Sequence
  Synthesized molecular recognition unit - heavy CDR1
NIFPIDDMS

SEQ ID NO: 1617 - protein, 9 aa, Artificial Sequence
  Synthesized molecular recognition unit - heavy CDR1
NINSIETLG

SEQ ID NO: 1618 - protein, 9 aa, Artificial Sequence
  Synthesized molecular recognition unit - heavy CDR1
RIFAIYDIA

SEQ ID NO: 1619 - protein, 9 aa, Artificial Sequence
  Synthesized molecular recognition unit - heavy CDR1
RIFAIYDMA

SEQ ID NO: 1620 - protein, 9 aa, Artificial Sequence
  Synthesized molecular recognition unit - heavy CDR1
RIFSIYDIA

SEQ ID NO: 1621 - protein, 9 aa, Artificial Sequence
  Synthesized molecular recognition unit - heavy CDR1
RIFSIYDMG

SEQ ID NO: 1622 - protein, 9 aa, Artificial Sequence
  Synthesized molecular recognition unit - heavy CDR1
RLLSYYALA

SEQ ID NO: 1623 - protein, 9 aa, Artificial Sequence
  Synthesized molecular recognition unit - heavy CDR1
RRFTTYGMG

SEQ ID NO: 1624 - protein, 9 aa, Artificial Sequence
  Synthesized molecular recognition unit - heavy CDR1
RSFNSYTTT

SEQ ID NO: 1625 - protein, 9 aa, Artificial Sequence
  Synthesized molecular recognition unit - heavy CDR1
RSFNSYVIG

SEQ ID NO: 1626 - protein, 9 aa, Artificial Sequence
  Synthesized molecular recognition unit - heavy CDR1
RSFSDFFMG

SEQ ID NO: 1627 - protein, 9 aa, Artificial Sequence
  Synthesized molecular recognition unit - heavy CDR1
RSLSSFAMG

SEQ ID NO: 1628 - protein, 9 aa, Artificial Sequence
  Synthesized molecular recognition unit - heavy CDR1
RSVSIYPMG

SEQ ID NO: 1629 - protein, 9 aa, Artificial Sequence
  Synthesized molecular recognition unit - heavy CDR1
RSVSSYNMG

SEQ ID NO: 1630 - protein, 9 aa, Artificial Sequence
  Synthesized molecular recognition unit - heavy CDR1
RTFGNYDMG

SEQ ID NO: 1631 - protein, 9 aa, Artificial Sequence
  Synthesized molecular recognition unit - heavy CDR1
RTFGSDVMG

SEQ ID NO: 1632 - protein, 9 aa, Artificial Sequence
  Synthesized molecular recognition unit - heavy CDR1
RTFGTYPNG

SEQ ID NO: 1633 - protein, 9 aa, Artificial Sequence
  Synthesized molecular recognition unit - heavy CDR1
RTFNIDDMG

SEQ ID NO: 1634 - protein, 9 aa, Artificial Sequence
  Synthesized molecular recognition unit - heavy CDR1
RTFNSGTMG

SEQ ID NO: 1635 - protein, 9 aa, Artificial Sequence
  Synthesized molecular recognition unit - heavy CDR1
RTFNTYAMG

SEQ ID NO: 1636 - protein, 9 aa, Artificial Sequence
  Synthesized molecular recognition unit - heavy CDR1
RTFRRYAMG

SEQ ID NO: 1637 - protein, 9 aa, Artificial Sequence
  Synthesized molecular recognition unit - heavy CDR1
RTFRSYTMG

SEQ ID NO: 1638 - protein, 9 aa, Artificial Sequence
  Synthesized molecular recognition unit - heavy CDR1
RTFSDYSMA

SEQ ID NO: 1639 - protein, 9 aa, Artificial Sequence
  Synthesized molecular recognition unit - heavy CDR1
RTFSDYSMG

SEQ ID NO: 1640 - protein, 9 aa, Artificial Sequence
  Synthesized molecular recognition unit - heavy CDR1
RTFSMYDMG

SEQ ID NO: 1641 - protein, 9 aa, Artificial Sequence
  Synthesized molecular recognition unit - heavy CDR1
RTFSNYAVG

SEQ ID NO: 1642 - protein, 9 aa, Artificial Sequence
  Synthesized molecular recognition unit - heavy CDR1
RTFSRYAMA

SEQ ID NO: 1643 - protein, 9 aa, Artificial Sequence
  Synthesized molecular recognition unit - heavy CDR1
RTFSRYAMG

SEQ ID NO: 1644 - protein, 9 aa, Artificial Sequence
  Synthesized molecular recognition unit - heavy CDR1
RTFSRYVMG

SEQ ID NO: 1645 - protein, 9 aa, Artificial Sequence
  Synthesized molecular recognition unit - heavy CDR1
RTFSSYAMA

SEQ ID NO: 1646 - protein, 9 aa, Artificial Sequence
  Synthesized molecular recognition unit - heavy CDR1
RTFSSYAMS

SEQ ID NO: 1647 - protein, 9 aa, Artificial Sequence
  Synthesized molecular recognition unit - heavy CDR1
RTFSSYAVG

SEQ ID NO: 1648 - protein, 9 aa, Artificial Sequence
  Synthesized molecular recognition unit - heavy CDR1
RTFSVYGVG

SEQ ID NO: 1649 - protein, 9 aa, Artificial Sequence
  Synthesized molecular recognition unit - heavy CDR1
RTFSYYAMG

SEQ ID NO: 1650 - protein, 9 aa, Artificial Sequence
  Synthesized molecular recognition unit - heavy CDR1
RTLSAYDMG

SEQ ID NO: 1651 - protein, 9 aa, Artificial Sequence
  Synthesized molecular recognition unit - heavy CDR1
RTLSRYSMG

SEQ ID NO: 1652 - protein, 9 aa, Artificial Sequence
  Synthesized molecular recognition unit - heavy CDR1
RTLSSFAMG

SEQ ID NO: 1653 - protein, 9 aa, Artificial Sequence
  Synthesized molecular recognition unit - heavy CDR1
RVLSYYAMA

SEQ ID NO: 1654 - protein, 9 aa, Artificial Sequence
  Synthesized molecular recognition unit - heavy CDR1
SIFMINTMA

SEQ ID NO: 1655 - protein, 9 aa, Artificial Sequence
  Synthesized molecular recognition unit - heavy CDR1
SIFRLGTMY

SEQ ID NO: 1656 - protein, 9 aa, Artificial Sequence
  Synthesized molecular recognition unit - heavy CDR1
SIFSDGAMG

SEQ ID NO: 1657 - protein, 9 aa, Artificial Sequence
  Synthesized molecular recognition unit - heavy CDR1
SIFSINTMG

SEQ ID NO: 1658 - protein, 9 aa, Artificial Sequence
  Synthesized molecular recognition unit - heavy CDR1
SIFSIYAMG

SEQ ID NO: 1659 - protein, 9 aa, Artificial Sequence
  Synthesized molecular recognition unit - heavy CDR1
SISSFNTMG

SEQ ID NO: 1660 - protein, 9 aa, Artificial Sequence
  Synthesized molecular recognition unit - heavy CDR1
SIVRSLPMA

SEQ ID NO: 1661 - protein, 9 aa, Artificial Sequence
  Synthesized molecular recognition unit - heavy CDR1
SLFSFNAMG

SEQ ID NO: 1662 - protein, 9 aa, Artificial Sequence
  Synthesized molecular recognition unit - heavy CDR1
SLFSFNAVG

SEQ ID NO: 1663 - protein, 9 aa, Artificial Sequence
  Synthesized molecular recognition unit - heavy CDR1
SVFTTFAKG

SEQ ID NO: 1664 - protein, 9 aa, Artificial Sequence
  Synthesized molecular recognition unit - heavy CDR1
TIFSINTMG

SEQ ID NO: 1665 - protein, 9 aa, Artificial Sequence
  Synthesized molecular recognition unit - heavy CDR1
TIVSIYRIN

SEQ ID NO: 1666 - protein, 9 aa, Artificial Sequence
  Synthesized molecular recognition unit - heavy CDR1
VIFALYDIA

SEQ ID NO: 1667 - protein, 9 aa, Artificial Sequence
  Synthesized molecular recognition unit - heavy CDR1
VTFSRYPIS

SEQ ID NO: 1668 - protein, 9 aa, Artificial Sequence
  Synthesized molecular recognition unit - heavy CDR1
YGFTGYYIH

SEQ ID NO: 1669 - protein, 9 aa, Artificial Sequence
  Synthesized molecular recognition unit - heavy CDR1
YIFTDYYMH

SEQ ID NO: 1670 - protein, 9 aa, Artificial Sequence
  Synthesized molecular recognition unit - heavy CDR1
YSFTRTDMH

SEQ ID NO: 1671 - protein, 9 aa, Artificial Sequence
  Synthesized molecular recognition unit - heavy CDR1
YTFASYDIH

SEQ ID NO: 1672 - protein, 9 aa, Artificial Sequence
  Synthesized molecular recognition unit - heavy CDR1
YTFSYRYLH

SEQ ID NO: 1673 - protein, 9 aa, Artificial Sequence
  Synthesized molecular recognition unit - heavy CDR1
YTFTDYFMN

SEQ ID NO: 1674 - protein, 9 aa, Artificial Sequence
  Synthesized molecular recognition unit - heavy CDR1
YTFTGYYIH

SEQ ID NO: 1675 - protein, 9 aa, Artificial Sequence
  Synthesized molecular recognition unit - heavy CDR1
YTFTGYYMH

SEQ ID NO: 1676 - protein, 9 aa, Artificial Sequence
  Synthesized molecular recognition unit - heavy CDR1
YTFTNNFMH

SEQ ID NO: 1677 - protein, 9 aa, Artificial Sequence
  Synthesized molecular recognition unit - heavy CDR1
YTFTNYCMH

SEQ ID NO: 1678 - protein, 9 aa, Artificial Sequence
  Synthesized molecular recognition unit - heavy CDR1
YTFTSYAMN

SEQ ID NO: 1679 - protein, 9 aa, Artificial Sequence
  Synthesized molecular recognition unit - heavy CDR1
YTFTSYDIN

SEQ ID NO: 1680 - protein, 9 aa, Artificial Sequence
  Synthesized molecular recognition unit - heavy CDR1
YTFTSYYMH

SEQ ID NO: 1681 - protein, 9 aa, Artificial Sequence
  Synthesized molecular recognition unit - heavy CDR1
YTFTYRYLH

SEQ ID NO: 1682 - protein, 9 aa, Artificial Sequence
  Synthesized molecular recognition unit - heavy CDR1
YTISNYYIH

SEQ ID NO: 1683 - protein, 9 aa, Artificial Sequence
  Synthesized molecular recognition unit - heavy CDR1
YZFTDYYMH

SEQ ID NO: 1684 - protein, 13 aa, Artificial Sequence
  Synthesized molecular recognition unit - heavy CDR2
AAIKWSGTNTYYA

SEQ ID NO: 1685 - protein, 13 aa, Artificial Sequence
  Synthesized molecular recognition unit - heavy CDR2
AAINWSGDSTKYA

SEQ ID NO: 1686 - protein, 13 aa, Artificial Sequence
  Synthesized molecular recognition unit - heavy CDR2
AAIQWSADNTFYA

SEQ ID NO: 1687 - protein, 13 aa, Artificial Sequence
  Synthesized molecular recognition unit - heavy CDR2
AAIRGSSGSTFYA

SEQ ID NO: 1688 - protein, 13 aa, Artificial Sequence
  Synthesized molecular recognition unit - heavy CDR2
AAIRWSGDNTYYA

SEQ ID NO: 1689 - protein, 13 aa, Artificial Sequence
  Synthesized molecular recognition unit - heavy CDR2
AAIRWSGGGTYYA

SEQ ID NO: 1690 - protein, 13 aa, Artificial Sequence
  Synthesized molecular recognition unit - heavy CDR2
AAISGSGGSTTYA

SEQ ID NO: 1691 - protein, 13 aa, Artificial Sequence
  Synthesized molecular recognition unit - heavy CDR2
AAISQSGYVRYYA

SEQ ID NO: 1692 - protein, 13 aa, Artificial Sequence
  Synthesized molecular recognition unit - heavy CDR2
AAISRFGGSTYYA

SEQ ID NO: 1693 - protein, 13 aa, Artificial Sequence
  Synthesized molecular recognition unit - heavy CDR2
AAISRFGGSTYYV

SEQ ID NO: 1694 - protein, 13 aa, Artificial Sequence
  Synthesized molecular recognition unit - heavy CDR2
AAISRNGDKSHYS

SEQ ID NO: 1695 - protein, 13 aa, Artificial Sequence
  Synthesized molecular recognition unit - heavy CDR2
AAISRRGGIIEYG

SEQ ID NO: 1696 - protein, 13 aa, Artificial Sequence
  Synthesized molecular recognition unit - heavy CDR2
AAISRSGANTAYS

SEQ ID NO: 1697 - protein, 13 aa, Artificial Sequence
  Synthesized molecular recognition unit - heavy CDR2
AAISRSGDRIYYS

SEQ ID NO: 1698 - protein, 12 aa, Artificial Sequence
  Synthesized molecular recognition unit - heavy CDR2
AAISRSGGIYYA

SEQ ID NO: 1699 - protein, 13 aa, Artificial Sequence
  Synthesized molecular recognition unit - heavy CDR2
AAISRSGVSTYYA

SEQ ID NO: 1700 - protein, 12 aa, Artificial Sequence
  Synthesized molecular recognition unit - heavy CDR2
AAISWGGRTAYA

SEQ ID NO: 1701 - protein, 13 aa, Artificial Sequence
  Synthesized molecular recognition unit - heavy CDR2
AAISWSGGSTKYA

SEQ ID NO: 1702 - protein, 13 aa, Artificial Sequence
  Synthesized molecular recognition unit - heavy CDR2
AAISYSGGSTKYA

SEQ ID NO: 1703 - protein, 13 aa, Artificial Sequence
  Synthesized molecular recognition unit - heavy CDR2
AAITRSGSNTYYA

SEQ ID NO: 1704 - protein, 13 aa, Artificial Sequence
  Synthesized molecular recognition unit - heavy CDR2
AAITWNGRSSDYA

SEQ ID NO: 1705 - protein, 13 aa, Artificial Sequence
  Synthesized molecular recognition unit - heavy CDR2
AAITWRGGITYYA

SEQ ID NO: 1706 - protein, 13 aa, Artificial Sequence
  Synthesized molecular recognition unit - heavy CDR2
AAITWRGGSTYYA

SEQ ID NO: 1707 - protein, 13 aa, Artificial Sequence
  Synthesized molecular recognition unit - heavy CDR2
AAVSASGGYTWYA

SEQ ID NO: 1708 - protein, 13 aa, Artificial Sequence
  Synthesized molecular recognition unit - heavy CDR2
AAVTWRSGSTYYA

SEQ ID NO: 1709 - protein, 12 aa, Artificial Sequence
  Synthesized molecular recognition unit - heavy CDR2
AGIRWSGSTLYA

SEQ ID NO: 1710 - protein, 13 aa, Artificial Sequence
  Synthesized molecular recognition unit - heavy CDR2
AGISWIADNRYYA

SEQ ID NO: 1711 - protein, 13 aa, Artificial Sequence
  Synthesized molecular recognition unit - heavy CDR2
AGITRGGATTYYS

SEQ ID NO: 1712 - protein, 12 aa, Artificial Sequence
  Synthesized molecular recognition unit - heavy CDR2
AGITSSGRTIYA

SEQ ID NO: 1713 - protein, 13 aa, Artificial Sequence
  Synthesized molecular recognition unit - heavy CDR2
AGMSGEGRNTKYR

SEQ ID NO: 1714 - protein, 14 aa, Artificial Sequence
  Synthesized molecular recognition unit - heavy CDR2
ALTGWGDGSTTYYE

SEQ ID NO: 1715 - protein, 13 aa, Artificial Sequence
  Synthesized molecular recognition unit - heavy CDR2
AMIRPVVTEIDYA

SEQ ID NO: 1716 - protein, 12 aa, Artificial Sequence
  Synthesized molecular recognition unit - heavy CDR2
ANMRGGGYMKYA

SEQ ID NO: 1717 - protein, 13 aa, Artificial Sequence
  Synthesized molecular recognition unit - heavy CDR2
ARIGWNGGSIVYA

SEQ ID NO: 1718 - protein, 13 aa, Artificial Sequence
  Synthesized molecular recognition unit - heavy CDR2
ARISRGDGYTDEA

SEQ ID NO: 1719 - protein, 12 aa, Artificial Sequence
  Synthesized molecular recognition unit - heavy CDR2
ASIGKSGSTNYA

SEQ ID NO: 1720 - protein, 13 aa, Artificial Sequence
  Synthesized molecular recognition unit - heavy CDR2
ASIRWSGQSPYYA

SEQ ID NO: 1721 - protein, 13 aa, Artificial Sequence
  Synthesized molecular recognition unit - heavy CDR2
ASIRWSSGNTWYA

SEQ ID NO: 1722 - protein, 12 aa, Artificial Sequence
  Synthesized molecular recognition unit - heavy CDR2
ASISSGGRTNYA

SEQ ID NO: 1723 - protein, 12 aa, Artificial Sequence
  Synthesized molecular recognition unit - heavy CDR2
ASISSGSRTNYA

SEQ ID NO: 1724 - protein, 13 aa, Artificial Sequence
  Synthesized molecular recognition unit - heavy CDR2
ASISSTSGSKYYA

SEQ ID NO: 1725 - protein, 13 aa, Artificial Sequence
  Synthesized molecular recognition unit - heavy CDR2
ASITASSDRTFYA

SEQ ID NO: 1726 - protein, 13 aa, Artificial Sequence
  Synthesized molecular recognition unit - heavy CDR2
ASVSWRYDRTYYT

SEQ ID NO: 1727 - protein, 11 aa, Artificial Sequence
  Synthesized molecular recognition unit - heavy CDR2
ATINDAQRYYA

SEQ ID NO: 1728 - protein, 13 aa, Artificial Sequence
  Synthesized molecular recognition unit - heavy CDR2
ATIRPVVSETTYA

SEQ ID NO: 1729 - protein, 13 aa, Artificial Sequence
  Synthesized molecular recognition unit - heavy CDR2
ATIRPVVTETDYA

SEQ ID NO: 1730 - protein, 13 aa, Artificial Sequence
  Synthesized molecular recognition unit - heavy CDR2
ATIRPVVTQIDYA

SEQ ID NO: 1731 - protein, 13 aa, Artificial Sequence
  Synthesized molecular recognition unit - heavy CDR2
ATISASGGNTAYA

SEQ ID NO: 1732 - protein, 13 aa, Artificial Sequence
  Synthesized molecular recognition unit - heavy CDR2
ATISRSGGNTYYA

SEQ ID NO: 1733 - protein, 13 aa, Artificial Sequence
  Synthesized molecular recognition unit - heavy CDR2
ATISWSGSSANYE

SEQ ID NO: 1734 - protein, 12 aa, Artificial Sequence
  Synthesized molecular recognition unit - heavy CDR2
ATMTSGGNTNYA

SEQ ID NO: 1735 - protein, 12 aa, Artificial Sequence
  Synthesized molecular recognition unit - heavy CDR2
ATVTSGGRINYA

SEQ ID NO: 1736 - protein, 13 aa, Artificial Sequence
  Synthesized molecular recognition unit - heavy CDR2
AVIGRSGGIKYYA

SEQ ID NO: 1737 - protein, 11 aa, Artificial Sequence
  Synthesized molecular recognition unit - heavy CDR2
AVISGGRTGYA

SEQ ID NO: 1738 - protein, 13 aa, Artificial Sequence
  Synthesized molecular recognition unit - heavy CDR2
AVISYDGSNKYYA

SEQ ID NO: 1739 - protein, 13 aa, Artificial Sequence
  Synthesized molecular recognition unit - heavy CDR2
AVISYGGSNKYYA

SEQ ID NO: 1740 - protein, 12 aa, Artificial Sequence
  Synthesized molecular recognition unit - heavy CDR2
AVITSGGKTVYA

SEQ ID NO: 1741 - protein, 12 aa, Artificial Sequence
  Synthesized molecular recognition unit - heavy CDR2
AVITTGGDTSYS

SEQ ID NO: 1742 - protein, 13 aa, Artificial Sequence
  Synthesized molecular recognition unit - heavy CDR2
AVTSYDGGKKNYA

SEQ ID NO: 1743 - protein, 12 aa, Artificial Sequence
  Synthesized molecular recognition unit - heavy CDR2
AYITGGGRTMDG

SEQ ID NO: 1744 - protein, 13 aa, Artificial Sequence
  Synthesized molecular recognition unit - heavy CDR2
GAISRSGNNTYYA

SEQ ID NO: 1745 - protein, 12 aa, Artificial Sequence
  Synthesized molecular recognition unit - heavy CDR2
GEINHSGATNYN

SEQ ID NO: 1746 - protein, 12 aa, Artificial Sequence
  Synthesized molecular recognition unit - heavy CDR2
GEINHSGSTNYN

SEQ ID NO: 1747 - protein, 13 aa, Artificial Sequence
  Synthesized molecular recognition unit - heavy CDR2
GGFDPEDGETIYA

SEQ ID NO: 1748 - protein, 13 aa, Artificial Sequence
  Synthesized molecular recognition unit - heavy CDR2
GGIIPIFGTADYA

SEQ ID NO: 1749 - protein, 13 aa, Artificial Sequence
  Synthesized molecular recognition unit - heavy CDR2
GGIIPIFGTANYA

SEQ ID NO: 1750 - protein, 13 aa, Artificial Sequence
  Synthesized molecular recognition unit - heavy CDR2
GGIIPLFGTANYA

SEQ ID NO: 1751 - protein, 13 aa, Artificial Sequence
  Synthesized molecular recognition unit - heavy CDR2
GGIIPVFGTADYA

SEQ ID NO: 1752 - protein, 13 aa, Artificial Sequence
  Synthesized molecular recognition unit - heavy CDR2
GGIIPVFGTANYA

SEQ ID NO: 1753 - protein, 13 aa, Artificial Sequence
  Synthesized molecular recognition unit - heavy CDR2
GGIRWSGGTTLYP

SEQ ID NO: 1754 - protein, 13 aa, Artificial Sequence
  Synthesized molecular recognition unit - heavy CDR2
GGIVPAYRRANYA

SEQ ID NO: 1755 - protein, 13 aa, Artificial Sequence
  Synthesized molecular recognition unit - heavy CDR2
GGVIPIFGTADYA

SEQ ID NO: 1756 - protein, 13 aa, Artificial Sequence
  Synthesized molecular recognition unit - heavy CDR2
GHVDPGDGETIYA

SEQ ID NO: 1757 - protein, 13 aa, Artificial Sequence
  Synthesized molecular recognition unit - heavy CDR2
GIINPSDGSTSHA

SEQ ID NO: 1758 - protein, 13 aa, Artificial Sequence
  Synthesized molecular recognition unit - heavy CDR2
GIINPSGDSTRFA

SEQ ID NO: 1759 - protein, 13 aa, Artificial Sequence
  Synthesized molecular recognition unit - heavy CDR2
GIINPSGGSTIYA

SEQ ID NO: 1760 - protein, 13 aa, Artificial Sequence
  Synthesized molecular recognition unit - heavy CDR2
GIINPSGGSTNYA

SEQ ID NO: 1761 - protein, 13 aa, Artificial Sequence
  Synthesized molecular recognition unit - heavy CDR2
GIINPSGGSTSYA

SEQ ID NO: 1762 - protein, 13 aa, Artificial Sequence
  Synthesized molecular recognition unit - heavy CDR2
GMINPSGGSTTYA

SEQ ID NO: 1763 - protein, 13 aa, Artificial Sequence
  Synthesized molecular recognition unit - heavy CDR2
GRIIPIFGTANYA

SEQ ID NO: 1764 - protein, 13 aa, Artificial Sequence
  Synthesized molecular recognition unit - heavy CDR2
GRIIPIHGIANYA

SEQ ID NO: 1765 - protein, 13 aa, Artificial Sequence
  Synthesized molecular recognition unit - heavy CDR2
GRIIPILGRANYA

SEQ ID NO: 1766 - protein, 13 aa, Artificial Sequence
  Synthesized molecular recognition unit - heavy CDR2
GRIIPILGRTNYA

SEQ ID NO: 1767 - protein, 13 aa, Artificial Sequence
  Synthesized molecular recognition unit - heavy CDR2
GRIIPILGSTNYA

SEQ ID NO: 1768 - protein, 13 aa, Artificial Sequence
  Synthesized molecular recognition unit - heavy CDR2
GRIIPVLKITNYA

SEQ ID NO: 1769 - protein, 13 aa, Artificial Sequence
  Synthesized molecular recognition unit - heavy CDR2
GRINPNGGGTIYA

SEQ ID NO: 1770 - protein, 13 aa, Artificial Sequence
  Synthesized molecular recognition unit - heavy CDR2
GRITPRLGIANYA

SEQ ID NO: 1771 - protein, 13 aa, Artificial Sequence
  Synthesized molecular recognition unit - heavy CDR2
GWINAGNGNTKYS

SEQ ID NO: 1772 - protein, 13 aa, Artificial Sequence
  Synthesized molecular recognition unit - heavy CDR2
GWINAGNGNTTYA

SEQ ID NO: 1773 - protein, 13 aa, Artificial Sequence
  Synthesized molecular recognition unit - heavy CDR2
GWINPNSGDTNYA

SEQ ID NO: 1774 - protein, 13 aa, Artificial Sequence
  Synthesized molecular recognition unit - heavy CDR2
GWINPNSGGTNYA

SEQ ID NO: 1775 - protein, 13 aa, Artificial Sequence
  Synthesized molecular recognition unit - heavy CDR2
GWISANNGNTDYA

SEQ ID NO: 1776 - protein, 13 aa, Artificial Sequence
  Synthesized molecular recognition unit - heavy CDR2
GWMNPNSGNTGYA

SEQ ID NO: 1777 - protein, 13 aa, Artificial Sequence
  Synthesized molecular recognition unit - heavy CDR2
  misc_feature (2)..(2): Xaa can be any naturally occurring amino acid
GXVNAGNGNTTYA

SEQ ID NO: 1778 - protein, 13 aa, Artificial Sequence
  Synthesized molecular recognition unit - heavy CDR2
GYISAYTGHTSYA

SEQ ID NO: 1779 - protein, 12 aa, Artificial Sequence
  Synthesized molecular recognition unit - heavy CDR2
SAIGAGGGTYYA

SEQ ID NO: 1780 - protein, 12 aa, Artificial Sequence
  Synthesized molecular recognition unit - heavy CDR2
SAIGTGGDTYYA

SEQ ID NO: 1781 - protein, 12 aa, Artificial Sequence
  Synthesized molecular recognition unit - heavy CDR2
SAIGTGGGTYYA

SEQ ID NO: 1782 - protein, 12 aa, Artificial Sequence
  Synthesized molecular recognition unit - heavy CDR2
SAIGTGGGTZYA

SEQ ID NO: 1783 - protein, 12 aa, Artificial Sequence
  Synthesized molecular recognition unit - heavy CDR2
SAIGTGGSTYYA

SEQ ID NO: 1784 - protein, 13 aa, Artificial Sequence
  Synthesized molecular recognition unit - heavy CDR2
SAIRGSGERTYYA

SEQ ID NO: 1785 - protein, 13 aa, Artificial Sequence
  Synthesized molecular recognition unit - heavy CDR2
SAISGRDGRTYYA

SEQ ID NO: 1786 - protein, 13 aa, Artificial Sequence
  Synthesized molecular recognition unit - heavy CDR2
SAISGSGGSTYYA

SEQ ID NO: 1787 - protein, 13 aa, Artificial Sequence
  Synthesized molecular recognition unit - heavy CDR2
SAISSGSDRTYYA

SEQ ID NO: 1788 - protein, 13 aa, Artificial Sequence
  Synthesized molecular recognition unit - heavy CDR2
SAITWSGGRTYYA

SEQ ID NO: 1789 - protein, 12 aa, Artificial Sequence
  Synthesized molecular recognition unit - heavy CDR2
SGIRWSGGTSYA

SEQ ID NO: 1790 - protein, 13 aa, Artificial Sequence
  Synthesized molecular recognition unit - heavy CDR2
SGISESGGRTYYA

SEQ ID NO: 1791 - protein, 13 aa, Artificial Sequence
  Synthesized molecular recognition unit - heavy CDR2
SGISESGGSTYYA

SEQ ID NO: 1792 - protein, 13 aa, Artificial Sequence
  Synthesized molecular recognition unit - heavy CDR2
SGISGSGGRTHYA

SEQ ID NO: 1793 - protein, 13 aa, Artificial Sequence
  Synthesized molecular recognition unit - heavy CDR2
SGISGSGGSTYYA

SEQ ID NO: 1794 - protein, 13 aa, Artificial Sequence
  Synthesized molecular recognition unit - heavy CDR2
SGISWNGGKTHYV

SEQ ID NO: 1795 - protein, 13 aa, Artificial Sequence
  Synthesized molecular recognition unit - heavy CDR2
SGISWNSGRIGYA

SEQ ID NO: 1796 - protein, 13 aa, Artificial Sequence
  Synthesized molecular recognition unit - heavy CDR2
SGISWNSGSIGYA

SEQ ID NO: 1797 - protein, 13 aa, Artificial Sequence
  Synthesized molecular recognition unit - heavy CDR2
SGISWNSGTTGYS

SEQ ID NO: 1798 - protein, 13 aa, Artificial Sequence
  Synthesized molecular recognition unit - heavy CDR2
SGITSNGGATYYA

SEQ ID NO: 1799 - protein, 13 aa, Artificial Sequence
  Synthesized molecular recognition unit - heavy CDR2
SGVSWNGSRTHYA

SEQ ID NO: 1800 - protein, 13 aa, Artificial Sequence
  Synthesized molecular recognition unit - heavy CDR2
SMISYNGGRAFYA

SEQ ID NO: 1801 - protein, 13 aa, Artificial Sequence
  Synthesized molecular recognition unit - heavy CDR2
SSISGSGGVTYYA

SEQ ID NO: 1802 - protein, 13 aa, Artificial Sequence
  Synthesized molecular recognition unit - heavy CDR2
SSISPRGGSTYYA

SEQ ID NO: 1803 - protein, 13 aa, Artificial Sequence
  Synthesized molecular recognition unit - heavy CDR2
SSISSSSTYIRYA

SEQ ID NO: 1804 - protein, 13 aa, Artificial Sequence
  Synthesized molecular recognition unit - heavy CDR2
SSISVSSGTTHYA

SEQ ID NO: 1805 - protein, 13 aa, Artificial Sequence
  Synthesized molecular recognition unit - heavy CDR2
SSISVSSGTTHYA

SEQ ID NO: 1806 - protein, 13 aa, Artificial Sequence
  Synthesized molecular recognition unit - heavy CDR2
STINPGGLSKSYA

SEQ ID NO: 1807 - protein, 13 aa, Artificial Sequence
  Synthesized molecular recognition unit - heavy CDR2
STISDTNSGTYYA

SEQ ID NO: 1808 - protein, 13 aa, Artificial Sequence
  Synthesized molecular recognition unit - heavy CDR2
STISGSGGRTYYA

SEQ ID NO: 1809 - protein, 13 aa, Artificial Sequence
  Synthesized molecular recognition unit - heavy CDR2
STISGSGGSTYYA

SEQ ID NO: 1810 - protein, 13 aa, Artificial Sequence
  Synthesized molecular recognition unit - heavy CDR2
STITTDSRGTYYA

SEQ ID NO: 1811 - protein, 13 aa, Artificial Sequence
  Synthesized molecular recognition unit - heavy CDR2
STLSGDANNAYYA

SEQ ID NO: 1812 - protein, 12 aa, Artificial Sequence
  Synthesized molecular recognition unit - heavy CDR2
SVISSGGTIYYA

SEQ ID NO: 1813 - protein, 13 aa, Artificial Sequence
  Synthesized molecular recognition unit - heavy CDR2
SYISGDSGYTNYA

SEQ ID NO: 1814 - protein, 13 aa, Artificial Sequence
  Synthesized molecular recognition unit - heavy CDR2
SYISGNSGYTNYA

SEQ ID NO: 1815 - protein, 13 aa, Artificial Sequence
  Synthesized molecular recognition unit - heavy CDR2
SYISSSGRTIFYA

SEQ ID NO: 1816 - protein, 13 aa, Artificial Sequence
  Synthesized molecular recognition unit - heavy CDR2
SYISSSSSTIYYA

SEQ ID NO: 1817 - protein, 13 aa, Artificial Sequence
  Synthesized molecular recognition unit - heavy CDR2
SYSSGNSGYTNYA

SEQ ID NO: 1818 - protein, 13 aa, Artificial Sequence
  Synthesized molecular recognition unit - heavy CDR2
SYVSDSGSSVYYA

SEQ ID NO: 1819 - protein, 13 aa, Artificial Sequence
  Synthesized molecular recognition unit - heavy CDR2
ZHVDPEDGETIYA

SEQ ID NO: 1820 - protein, 24 aa, Artificial Sequence
  Synthesized molecular recognition unit - heavy CDR3
CAAARRSGTYDIGQYLRESAYVFW

SEQ ID NO: 1821 - protein, 17 aa, Artificial Sequence
  Synthesized molecular recognition unit - heavy CDR3
CAAAYSYSQYGSSYSYW

SEQ ID NO: 1822 - protein, 13 aa, Artificial Sequence
  Synthesized molecular recognition unit - heavy CDR3
CAADDLGLELHYW

SEQ ID NO: 1823 - protein, 19 aa, Artificial Sequence
  Synthesized molecular recognition unit - heavy CDR3
CAADPRGVTLPRATAYEYW

SEQ ID NO: 1824 - protein, 22 aa, Artificial Sequence
  Synthesized molecular recognition unit - heavy CDR3
CAADRIENYLGRYYDPSEYEYW

SEQ ID NO: 1825 - protein, 22 aa, Artificial Sequence
  Synthesized molecular recognition unit - heavy CDR3
CAADRIENYLGRYYDPSEYEYW

SEQ ID NO: 1826 - protein, 21 aa, Artificial Sequence
  Synthesized molecular recognition unit - heavy CDR3
CAADTNWRAGPRVGIDEYAYW

SEQ ID NO: 1827 - protein, 17 aa, Artificial Sequence
  Synthesized molecular recognition unit - heavy CDR3
CAAGPNWSTRNREYDYW

SEQ ID NO: 1828 - protein, 14 aa, Artificial Sequence
  Synthesized molecular recognition unit - heavy CDR3
CAAGSTVVAEFNYW

SEQ ID NO: 1829 - protein, 14 aa, Artificial Sequence
  Synthesized molecular recognition unit - heavy CDR3
CAAGSTVVAEFNYW

SEQ ID NO: 1830 - protein, 14 aa, Artificial Sequence
  Synthesized molecular recognition unit - heavy CDR3
CAAGSTVVAEFNYW

SEQ ID NO: 1831 - protein, 18 aa, Artificial Sequence
  Synthesized molecular recognition unit - heavy CDR3
CAAKFGVLATTESRHDYW

SEQ ID NO: 1832 - protein, 20 aa, Artificial Sequence
  Synthesized molecular recognition unit - heavy CDR3
CAAQFRNDYGLRYQSTNNYW

SEQ ID NO: 1833 - protein, 21 aa, Artificial Sequence
  Synthesized molecular recognition unit - heavy CDR3
CAARTSGGLFHYRRSDHWDTW

SEQ ID NO: 1834 - protein, 22 aa, Artificial Sequence
  Synthesized molecular recognition unit - heavy CDR3
CAASMEAMNSLRVNKERYYQSW

SEQ ID NO: 1835 - protein, 22 aa, Artificial Sequence
  Synthesized molecular recognition unit - heavy CDR3
CAASMEAMNSLRVNKERYYQSW

SEQ ID NO: 1836 - protein, 22 aa, Artificial Sequence
  Synthesized molecular recognition unit - heavy CDR3
CAASMEAMNSLRVNKERYYQSW

SEQ ID NO: 1837 - protein, 17 aa, Artificial Sequence
  Synthesized molecular recognition unit - heavy CDR3
CAASVYISRRDSDYGYW

SEQ ID NO: 1838 - protein, 21 aa, Artificial Sequence
  Synthesized molecular recognition unit - heavy CDR3
CAAVFTGRFYGRPPREKYDYW

SEQ ID NO: 1839 - protein, 19 aa, Artificial Sequence
  Synthesized molecular recognition unit - heavy CDR3
CAAVQAVIGGTLTTAYDYW

SEQ ID NO: 1840 - protein, 19 aa, Artificial Sequence
  Synthesized molecular recognition unit - heavy CDR3
CAAYSTFNTDVASMKPDYW

SEQ ID NO: 1841 - protein, 21 aa, Artificial Sequence
  Synthesized molecular recognition unit - heavy CDR3
CAGDRSRYLYGDSLRGPYGYW

SEQ ID NO: 1842 - protein, 14 aa, Artificial Sequence
  Synthesized molecular recognition unit - heavy CDR3
CAIVRGKKWYFDLW

SEQ ID NO: 1843 - protein, 18 aa, Artificial Sequence
  Synthesized molecular recognition unit - heavy CDR3
CAKAQATGWSGYYTFDYW

SEQ ID NO: 1844 - protein, 18 aa, Artificial Sequence
  Synthesized molecular recognition unit - heavy CDR3
CAKAQATGWSGYYTFDYW

SEQ ID NO: 1845 - protein, 14 aa, Artificial Sequence
  Synthesized molecular recognition unit - heavy CDR3
CAKDDFSLYGMDVW

SEQ ID NO: 1846 - protein, 13 aa, Artificial Sequence
  Synthesized molecular recognition unit - heavy CDR3
CAKDGTDGRFDPW

SEQ ID NO: 1847 - protein, 17 aa, Artificial Sequence
  Synthesized molecular recognition unit - heavy CDR3
CAKDLGIQLPDYYFDYW

SEQ ID NO: 1848 - protein, 16 aa, Artificial Sequence
  Synthesized molecular recognition unit - heavy CDR3
CAKDLGRAAAGSMDVW

SEQ ID NO: 1849 - protein, 16 aa, Artificial Sequence
  Synthesized molecular recognition unit - heavy CDR3
CAKDLGRAAAGSMDVW

SEQ ID NO: 1850 - protein, 16 aa, Artificial Sequence
  Synthesized molecular recognition unit - heavy CDR3
CAKDLGRAAAGSMDVW

SEQ ID NO: 1851 - protein, 17 aa, Artificial Sequence
  Synthesized molecular recognition unit - heavy CDR3
CAKDMVHLIVALAIDYW

SEQ ID NO: 1852 - protein, 8 aa, Artificial Sequence
  Synthesized molecular recognition unit - heavy CDR3
CAKDSGLV

SEQ ID NO: 1853 - protein, 8 aa, Artificial Sequence
  Synthesized molecular recognition unit - heavy CDR3
CAKDSGLV

SEQ ID NO: 1854 - protein, 16 aa, Artificial Sequence
  Synthesized molecular recognition unit - heavy CDR3
CAKDSGNYGYYGMDVW

SEQ ID NO: 1855 - protein, 19 aa, Artificial Sequence
  Synthesized molecular recognition unit - heavy CDR3
CAKEDYDSSGYYYYYFQHW

SEQ ID NO: 1856 - protein, 17 aa, Artificial Sequence
  Synthesized molecular recognition unit - heavy CDR3
CAKGGDYFYYYYGMDVW

SEQ ID NO: 1857 - protein, 17 aa, Artificial Sequence
  Synthesized molecular recognition unit - heavy CDR3
CAKGGDYFYYYYGMDVW

SEQ ID NO: 1858 - protein, 17 aa, Artificial Sequence
  Synthesized molecular recognition unit - heavy CDR3
CAKGGDYYYYYYGMDVW

SEQ ID NO: 1859 - protein, 16 aa, Artificial Sequence
  Synthesized molecular recognition unit - heavy CDR3
CAKGGRDGYKGYFDYW

SEQ ID NO: 1860 - protein, 16 aa, Artificial Sequence
  Synthesized molecular recognition unit - heavy CDR3
CAKGGRDGYKGYFDYW

SEQ ID NO: 1861 - protein, 16 aa, Artificial Sequence
  Synthesized molecular recognition unit - heavy CDR3
CAKGGRDGYKGYFDYW

SEQ ID NO: 1862 - protein, 16 aa, Artificial Sequence
  Synthesized molecular recognition unit - heavy CDR3
CAKGGRDGYKGYFDYW

SEQ ID NO: 1863 - protein, 16 aa, Artificial Sequence
  Synthesized molecular recognition unit - heavy CDR3
CAKGGRDGYKGYFDYW

SEQ ID NO: 1864 - protein, 12 aa, Artificial Sequence
  Synthesized molecular recognition unit - heavy CDR3
CAKGGSLDMDVW

SEQ ID NO: 1865 - protein, 11 aa, Artificial Sequence
  Synthesized molecular recognition unit - heavy CDR3
CAKGGYELDYW

SEQ ID NO: 1866 - protein, 11 aa, Artificial Sequence
  Synthesized molecular recognition unit - heavy CDR3
CAKGWLDFDYW

SEQ ID NO: 1867 - protein, 11 aa, Artificial Sequence
  Synthesized molecular recognition unit - heavy CDR3
CAKGWLDFDYW

SEQ ID NO: 1868 - protein, 18 aa, Artificial Sequence
  Synthesized molecular recognition unit - heavy CDR3
CAKSIAAAGTGYYGMDVW

SEQ ID NO: 1869 - protein, 18 aa, Artificial Sequence
  Synthesized molecular recognition unit - heavy CDR3
CAKSIAAAGTGYYGMDVW

SEQ ID NO: 1870 - protein, 18 aa, Artificial Sequence
  Synthesized molecular recognition unit - heavy CDR3
CAKTYYDFWSGYYTFDYW

SEQ ID NO: 1871 - protein, 15 aa, Artificial Sequence
  Synthesized molecular recognition unit - heavy CDR3
CAKVASGWSWPFDIW

SEQ ID NO: 1872 - protein, 19 aa, Artificial Sequence
  Synthesized molecular recognition unit - heavy CDR3
CALTWAPTPTNRRSDYAYW

SEQ ID NO: 1873 - protein, 14 aa, Artificial Sequence
  Synthesized molecular recognition unit - heavy CDR3
CANGLEDAYAFDIW

SEQ ID NO: 1874 - protein, 14 aa, Artificial Sequence
  Synthesized molecular recognition unit - heavy CDR3
CAPALTDAGSFDYW

SEQ ID NO: 1875 - protein, 20 aa, Artificial Sequence
  Synthesized molecular recognition unit - heavy CDR3
CAPYYYDKSAKPLRSYFDHW

SEQ ID NO: 1876 - protein, 18 aa, Artificial Sequence
  Synthesized molecular recognition unit - heavy CDR3
CARAAGNFWSGYYTFDYW

SEQ ID NO: 1877 - protein, 18 aa, Artificial Sequence
  Synthesized molecular recognition unit - heavy CDR3
CARAAGNFWSGYYTFDYW

SEQ ID NO: 1878 - protein, 21 aa, Artificial Sequence
  Synthesized molecular recognition unit - heavy CDR3
CARAGIAAAPGSRNYYGMDVW

SEQ ID NO: 1879 - protein, 16 aa, Artificial Sequence
  Synthesized molecular recognition unit - heavy CDR3
CARAGTNWGGWYFDLW

SEQ ID NO: 1880 - protein, 16 aa, Artificial Sequence
  Synthesized molecular recognition unit - heavy CDR3
CARAGYGRYYYGMDVW

SEQ ID NO: 1881 - protein, 18 aa, Artificial Sequence
  Synthesized molecular recognition unit - heavy CDR3
CARAGYWSGYGYYGMDVW

SEQ ID NO: 1882 - protein, 18 aa, Artificial Sequence
  Synthesized molecular recognition unit - heavy CDR3
CARAGYYDSSGYYAFDIW

SEQ ID NO: 1883 - protein, 16 aa, Artificial Sequence
  Synthesized molecular recognition unit - heavy CDR3
CARATGSGWYTDLGYW

SEQ ID NO: 1884 - protein, 16 aa, Artificial Sequence
  Synthesized molecular recognition unit - heavy CDR3
CARATGSGWYTDLGYW

SEQ ID NO: 1885 - protein, 12 aa, Artificial Sequence
  Synthesized molecular recognition unit - heavy CDR3
CARDAGGDYDYW

SEQ ID NO: 1886 - protein, 18 aa, Artificial Sequence
  Synthesized molecular recognition unit - heavy CDR3
CARDASGGSTGWYYFDSW

SEQ ID NO: 1887 - protein, 18 aa, Artificial Sequence
  Synthesized molecular recognition unit - heavy CDR3
CARDASGGSTGWYYFDSW

SEQ ID NO: 1888 - protein, 13 aa, Artificial Sequence
  Synthesized molecular recognition unit - heavy CDR3
CARDDGLGGMDVW

SEQ ID NO: 1889 - protein, 13 aa, Artificial Sequence
  Synthesized molecular recognition unit - heavy CDR3
CARDDGLGGMDVW

SEQ ID NO: 1890 - protein, 13 aa, Artificial Sequence
  Synthesized molecular recognition unit - heavy CDR3
CARDDSMGAFDIW

SEQ ID NO: 1891 - protein, 13 aa, Artificial Sequence
  Synthesized molecular recognition unit - heavy CDR3
CARDEVEGGMDVW

SEQ ID NO: 1892 - protein, 13 aa, Artificial Sequence
  Synthesized molecular recognition unit - heavy CDR3
CARDFLGSTGDYW

SEQ ID NO: 1893 - protein, 13 aa, Artificial Sequence
  Synthesized molecular recognition unit - heavy CDR3
CARDFLGSTGDYW

SEQ ID NO: 1894 - protein, 13 aa, Artificial Sequence
  Synthesized molecular recognition unit - heavy CDR3
CARDGGIRDFDYW

SEQ ID NO: 1895 - protein, 16 aa, Artificial Sequence
  Synthesized molecular recognition unit - heavy CDR3
CARDHSSGWRHYFDYW

SEQ ID NO: 1896 - protein, 12 aa, Artificial Sequence
  Synthesized molecular recognition unit - heavy CDR3
CARDKGYAFDIW

SEQ ID NO: 1897 - protein, 8 aa, Artificial Sequence [sequence omitted]

SEQ ID NO: 1898 - protein, 12 aa, Artificial Sequence
  Synthesized molecular recognition unit - heavy CDR3
CARDLGGTADYW

SEQ ID NO: 1899 - protein, 12 aa, Artificial Sequence
  Synthesized molecular recognition unit - heavy CDR3
CARDLGGTADYW

SEQ ID NO: 1900 - protein, 12 aa, Artificial Sequence
  Synthesized molecular recognition unit - heavy CDR3
CARDLGGTADYW

SEQ ID NO: 1901 - protein, 18 aa, Artificial Sequence
  Synthesized molecular recognition unit - heavy CDR3
CARDLRNWGSPYWYFDLW

SEQ ID NO: 1902 - protein, 20 aa, Artificial Sequence
  Synthesized molecular recognition unit - heavy CDR3
CARDQDYGDYGWYYYGMDVW

SEQ ID NO: 1903 - protein, 20 aa, Artificial Sequence
  Synthesized molecular recognition unit - heavy CDR3
CARDQDYGDYGWYYYGMDVW

SEQ ID NO: 1904 - protein, 13 aa, Artificial Sequence
  Synthesized molecular recognition unit - heavy CDR3
CARDREQQILDYW

SEQ ID NO: 1905 - protein, 13 aa, Artificial Sequence
  Synthesized molecular recognition unit - heavy CDR3
CARDSDWGVVDPW

SEQ ID NO: 1906 - protein, 11 aa, Artificial Sequence [sequence omitted]

SEQ ID NO: 1907 - protein, 13 aa, Artificial Sequence
  Synthesized molecular recognition unit - heavy CDR3
CARDWELYGMDVW

SEQ ID NO: 1908 - protein, 21 aa, Artificial Sequence
  Synthesized molecular recognition unit - heavy CDR3
CARDWGIAAAGDYYYYGMDVW

SEQ ID NO: 1909 - protein, 21 aa, Artificial Sequence
  Synthesized molecular recognition unit - heavy CDR3
CARDWGIAAAGDYYYYGMDVW

SEQ ID NO: 1910 - protein, 14 aa, Artificial Sequence
  Synthesized molecular recognition unit - heavy CDR3
CARDYSDRSGIDYW

SEQ ID NO: 1911 - protein, 14 aa, Artificial Sequence
  Synthesized molecular recognition unit - heavy CDR3
CARDYSDRSGIDYW

SEQ ID NO: 1912 - protein, 18 aa, Artificial Sequence
  Synthesized molecular recognition unit - heavy CDR3
CARDYYGSGSYNYGMDVW

SEQ ID NO: 1913 - protein, 18 aa, Artificial Sequence
  Synthesized molecular recognition unit - heavy CDR3
CARDYYGSGSYNYGMDVW

SEQ ID NO: 1914 - protein, 16 aa, Artificial Sequence
  Synthesized molecular recognition unit - heavy CDR3
CAREAAEIPVGAFDIW

SEQ ID NO: 1915 - protein, 15 aa, Artificial Sequence
  Synthesized molecular recognition unit - heavy CDR3
CAREAYYYYYGMDVW

SEQ ID NO: 1916 - protein, 15 aa, Artificial Sequence
  Synthesized molecular recognition unit - heavy CDR3
CAREAYYYYYGMDVW

SEQ ID NO: 1917 - protein, 13 aa, Artificial Sequence
  Synthesized molecular recognition unit - heavy CDR3
CAREEGVGGMDVW

SEQ ID NO: 1918 - protein, 16 aa, Artificial Sequence
  Synthesized molecular recognition unit - heavy CDR3
CAREERGATGRAFDIW

SEQ ID NO: 1919 - protein, 12 aa, Artificial Sequence [sequence omitted]

SEQ ID NO: 1920 - protein, 22 aa, Artificial Sequence
  Synthesized molecular recognition unit - heavy CDR3
CARESALYSSSWYYYYYGMDVW

SEQ ID NO: 1921 - protein, 18 aa, Artificial Sequence
  Synthesized molecular recognition unit - heavy CDR3
CAREVAVKDYYYYYMDVW

SEQ ID NO: 1922 - protein, 13 aa, Artificial Sequence
  Synthesized molecular recognition unit - heavy CDR3
CAREYSYGYFRYW

SEQ ID NO: 1923 - protein, 11 aa, Artificial Sequence
  Synthesized molecular recognition unit - heavy CDR3
CARGDLEFDYW

SEQ ID NO: 1924 - protein, 15 aa, Artificial Sequence
  Synthesized molecular recognition unit - heavy CDR3
CARGEQWLVWGFDPW

SEQ ID NO: 1925 - protein, 10 aa, Artificial Sequence [sequence omitted]

SEQ ID NO: 1926 - protein, 18 aa, Artificial Sequence
  Synthesized molecular recognition unit - heavy CDR3
CARGGDSSGYYYYAFDIW

SEQ ID NO: 1927 - protein, 17 aa, Artificial Sequence
  Synthesized molecular recognition unit - heavy CDR3
CARGGGPNEHDYYFDYW

SEQ ID NO: 1928 - protein, 17 aa, Artificial Sequence
  Synthesized molecular recognition unit - heavy CDR3
CARGGNTYYYYYGMDVW

SEQ ID NO: 1929 - protein, 16 aa, Artificial Sequence
  Synthesized molecular recognition unit - heavy CDR3
CARGGSGSYYYAFDIW

SEQ ID NO: 1930 - protein, 16 aa, Artificial Sequence
  Synthesized molecular recognition unit - heavy CDR3
CARGGSGSYYYAFDIW

SEQ ID NO: 1931 - protein, 17 aa, Artificial Sequence
  Synthesized molecular recognition unit - heavy CDR3
CARGGSGWSNYYGMDVW

SEQ ID NO: 1932 - protein, 12 aa, Artificial Sequence
  Synthesized molecular recognition unit - heavy CDR3
CARGGYSTLDYW

SEQ ID NO: 1933 - protein, 12 aa, Artificial Sequence
  Synthesized molecular recognition unit - heavy CDR3
CARGGYSTLDYW

SEQ ID NO: 1934 - protein, 12 aa, Artificial Sequence
  Synthesized molecular recognition unit - heavy CDR3
CARGGYSTLDYW

SEQ ID NO: 1935 - protein, 18 aa, Artificial Sequence
  Synthesized molecular recognition unit - heavy CDR3
CARGLYKRYSYGYGMDVW

SEQ ID NO: 1936 - protein, 11 aa, Artificial Sequence
  Synthesized molecular recognition unit - heavy CDR3
CARGNLDFDYW

SEQ ID NO: 1937 - protein, 12 aa, Artificial Sequence
  Synthesized molecular recognition unit - heavy CDR3
CARGNPYYFDYW

SEQ ID NO: 1938 - protein, 17 aa, Artificial Sequence
  Synthesized molecular recognition unit - heavy CDR3
CARGPAAIGILGWFDPW

SEQ ID NO: 1939 - protein, 11 aa, Artificial Sequence [sequence omitted]

SEQ ID NO: 1940 - protein, 11 aa, Artificial Sequence [sequence omitted]

SEQ ID NO: 1941 - protein, 11 aa, Artificial Sequence [sequence omitted]

SEQ ID NO: 1942 - protein, 17 aa, Artificial Sequence
  Synthesized molecular recognition unit - heavy CDR3
CARGRGKKNYYYGMDVW

SEQ ID NO: 1943 - protein, 17 aa, Artificial Sequence
  Synthesized molecular recognition unit - heavy CDR3
CARGRGYSYGYYAFDIW

SEQ ID NO: 1944 - protein, 19 aa, Artificial Sequence
  Synthesized molecular recognition unit - heavy CDR3
CARGSDCSGGSCYYSFDYW

SEQ ID NO: 1945 - protein, 13 aa, Artificial Sequence
  Synthesized molecular recognition unit - heavy CDR3
CARGSGWSGLDYW

SEQ ID NO: 1946 - protein, 18 aa, Artificial Sequence
  Synthesized molecular recognition unit - heavy CDR3
CARGSGYYGPGYYGMDVW

SEQ ID NO: 1947 - protein, 11 aa, Artificial Sequence [sequence omitted]

SEQ ID NO: 1948 - protein, 11 aa, Artificial Sequence [sequence omitted]

SEQ ID NO: 1949 - protein, 18 aa, Artificial Sequence
  Synthesized molecular recognition unit - heavy CDR3
CARGTTGKGYYYYGMDVW

SEQ ID NO: 1950 - protein, 18 aa, Artificial Sequence
  Synthesized molecular recognition unit - heavy CDR3
CARGVSSGYYYYYGMDVW

SEQ ID NO: 1951 - protein, 11 aa, Artificial Sequence
  Synthesized molecular recognition unit - heavy CDR3
CARGYGDYDLW

SEQ ID NO: 1952 - protein, 11 aa, Artificial Sequence
  Synthesized molecular recognition unit - heavy CDR3
CARGYGDYDLW

SEQ ID NO: 1953 - protein, 11 aa, Artificial Sequence
  Synthesized molecular recognition unit - heavy CDR3
CARGYYDFDYW

SEQ ID NO: 1954 - protein, 18 aa, Artificial Sequence
  Synthesized molecular recognition unit - heavy CDR3
CARHLSSGYLSYYGMDVW

SEQ ID NO: 1955 - protein, 18 aa, Artificial Sequence
  Synthesized molecular recognition unit - heavy CDR3
CARHLSSGYLSYYGMDVW

SEQ ID NO: 1956 - protein, 24 aa, Artificial Sequence
  Synthesized molecular recognition unit - heavy CDR3
CARHPGSFGGYSYAWYYYYGMDVW

SEQ ID NO: 1957 - protein, 24 aa, Artificial Sequence
  Synthesized molecular recognition unit - heavy CDR3
CARHPGSFGGYSYAWYYYYGMDVW

SEQ ID NO: 1958 - protein, 15 aa, Artificial Sequence
  Synthesized molecular recognition unit - heavy CDR3
CARLDYGETEGNGDW

SEQ ID NO: 1959 - protein, 19 aa, Artificial Sequence
  Synthesized molecular recognition unit - heavy CDR3
CARLGSYGSPYYYYGMDVW

SEQ ID NO: 1960 - protein, 19 aa, Artificial Sequence
  Synthesized molecular recognition unit - heavy CDR3
CARLGSYGSPYYYYGMDVW

SEQ ID NO: 1961 - protein, 18 aa, Artificial Sequence
  Synthesized molecular recognition unit - heavy CDR3
CARLGSYPGPYYYYMDVW

SEQ ID NO: 1962 - protein, 18 aa, Artificial Sequence
  Synthesized molecular recognition unit - heavy CDR3
CARLGSYPGPYYYYMDVW

SEQ ID NO: 1963 - protein, 20 aa, Artificial Sequence
  Synthesized molecular recognition unit - heavy CDR3
CARRGGDVTVPAAYYAMDVW

SEQ ID NO: 1964 - protein, 18 aa, Artificial Sequence
  Synthesized molecular recognition unit - heavy CDR3
CARTLSGYSSSWYVFDYW

SEQ ID NO: 1965 - protein, 12 aa, Artificial Sequence [sequence omitted]

SEQ ID NO: 1966 - protein, 10 aa, Artificial Sequence
  Synthesized molecular recognition unit - heavy CDR3
CASAADFDYW

SEQ ID NO: 1967 - protein, 10 aa, Artificial Sequence
  Synthesized molecular recognition unit - heavy CDR3
CASAADFDYW

SEQ ID NO: 1968 - protein, 18 aa, Artificial Sequence
  Synthesized molecular recognition unit - heavy CDR3
CASAKNDFWSGYFAFDYW

SEQ ID NO: 1969 - protein, 14 aa, Artificial Sequence
  Synthesized molecular recognition unit - heavy CDR3
CASDIVVDDAFDTW

SEQ ID NO: 1970 - protein, 15 aa, Artificial Sequence
  Synthesized molecular recognition unit - heavy CDR3
CASGDTYDLYSLDVW

SEQ ID NO: 1971 - protein, 13 aa, Artificial Sequence
  Synthesized molecular recognition unit - heavy CDR3
CASGSYYSDFDYW

SEQ ID NO: 1972 - protein, 13 aa, Artificial Sequence
  Synthesized molecular recognition unit - heavy CDR3
CASGSYYSDFDYW

SEQ ID NO: 1973 - protein, 17 aa, Artificial Sequence
  Synthesized molecular recognition unit - heavy CDR3
CASGYSYGLYYYGMDVW

SEQ ID NO: 1974 - protein, 17 aa, Artificial Sequence
  Synthesized molecular recognition unit - heavy CDR3
CASGYSYGLYYYGMDVW

SEQ ID NO: 1975 - protein, 19 aa, Artificial Sequence
  Synthesized molecular recognition unit - heavy CDR3
CASSVVPAGPAGVYAFDIW

SEQ ID NO: 1976 - protein, 19 aa, Artificial Sequence
  Synthesized molecular recognition unit - heavy CDR3
CASSVVPAGPAGVYAFDIW

SEQ ID NO: 1977 - protein, 13 aa, Artificial Sequence
  Synthesized molecular recognition unit - heavy CDR3
CASTVTTDAFDIW

SEQ ID NO: 1978 - protein, 13 aa, Artificial Sequence
  Synthesized molecular recognition unit - heavy CDR3
CASTVTTDAFDIW

SEQ ID NO: 1979 - protein, 11 aa, Artificial Sequence
  Synthesized molecular recognition unit - heavy CDR3
CASYFGVMDVW

SEQ ID NO: 1980 - protein, 15 aa, Artificial Sequence
  Synthesized molecular recognition unit - heavy CDR3
CATAYGSSSLNIDYW

SEQ ID NO: 1981 - protein, 15 aa, Artificial Sequence
  Synthesized molecular recognition unit - heavy CDR3
CATAYGSSSLNIDYW

SEQ ID NO: 1982 - protein, 15 aa, Artificial Sequence
  Synthesized molecular recognition unit - heavy CDR3
CATAYGSSSLNIDYW

SEQ ID NO: 1983 - protein, 15 aa, Artificial Sequence
  Synthesized molecular recognition unit - heavy CDR3
CATDEYSSSYAFDIW

SEQ ID NO: 1984 - protein, 15 aa, Artificial Sequence [sequence omitted]

SEQ ID NO: 1985 - protein, 13 aa, Artificial Sequence
  Synthesized molecular recognition unit - heavy CDR3
CATEAALDAFDIW

SEQ ID NO: 1986 - protein, 13 aa, Artificial Sequence
  Synthesized molecular recognition unit - heavy CDR3
CATEAALDAFDIW

SEQ ID NO: 1987 - protein, 9 aa, Artificial Sequence
  Synthesized molecular recognition unit - heavy CDR3
CATGPNSIY

SEQ ID NO: 1988 - protein, 9 aa, Artificial Sequence
  Synthesized molecular recognition unit - heavy CDR3
CATGPNSIY

SEQ ID NO: 1989 - protein, 19 aa, Artificial Sequence
  Synthesized molecular recognition unit - heavy CDR3
CATRRPFNSYNTEQSYDSW

SEQ ID NO: 1990 - protein, 19 aa, Artificial Sequence
  Synthesized molecular recognition unit - heavy CDR3
CATRRPFNSYNTEQSYDSW

SEQ ID NO: 1991 - protein, 19 aa, Artificial Sequence
  Synthesized molecular recognition unit - heavy CDR3
CATRTGYSYGFNFWAFDIW

SEQ ID NO: 1992 - protein, 19 aa, Artificial Sequence
  Synthesized molecular recognition unit - heavy CDR3
CATRTGYSYGFNFWAFDIW

SEQ ID NO: 1993 - protein, 14 aa, Artificial Sequence
  Synthesized molecular recognition unit - heavy CDR3
CATSPYGVFTLDYW

SEQ ID NO: 1994 - protein, 14 aa, Artificial Sequence
  Synthesized molecular recognition unit - heavy CDR3
CATSPYGVFTLDYW

SEQ ID NO: 1995 - protein, 16 aa, Artificial Sequence
  Synthesized molecular recognition unit - heavy CDR3
CATVTGYSSAGAFDIW

SEQ ID NO: 1996 - protein, 11 aa, Artificial Sequence
  Synthesized molecular recognition unit - heavy CDR3
CAVVDDAFDIW

SEQ ID NO: 1997 - protein, 11 aa, Artificial Sequence
  Synthesized molecular recognition unit - heavy CDR3
CAVVDDAFDIW

SEQ ID NO: 1998 - protein, 7 aa, Artificial Sequence
  Synthesized molecular recognition unit - heavy CDR3
CGSRGYW

SEQ ID NO: 1999 - protein, 15 aa, Artificial Sequence
  Synthesized molecular recognition unit - heavy CDR3
CHAKQLRNGQMYTYW

SEQ ID NO: 2000 - protein, 15 aa, Artificial Sequence
  Synthesized molecular recognition unit - heavy CDR3
CHAVENILGRFVDYW

SEQ ID NO: 2001 - protein, 14 aa, Artificial Sequence
  Synthesized molecular recognition unit - heavy CDR3
CHGRDYGSNAPQYW

SEQ ID NO: 2002 - protein, 14 aa, Artificial Sequence
  Synthesized molecular recognition unit - heavy CDR3
CKAAPRWGGATAYW

SEQ ID NO: 2003 - protein, 14 aa, Artificial Sequence
  Synthesized molecular recognition unit - heavy CDR3
CKIYGLNGQPLGSW

SEQ ID NO: 2004 - protein, 19 aa, Artificial Sequence
  Synthesized molecular recognition unit - heavy CDR3
CKLQVRPIGYSSAYSRNYW

SEQ ID NO: 2005 - protein, 9 aa, Artificial Sequence
  Synthesized molecular recognition unit - heavy CDR3
CKQHPNGYR

SEQ ID NO: 2006 - protein, 18 aa, Artificial Sequence
  Synthesized molecular recognition unit - heavy CDR3
CNAASTVTAWPYYGPDYW

SEQ ID NO: 2007 - protein, 18 aa, Artificial Sequence
  Synthesized molecular recognition unit - heavy CDR3
CNAASTVTAWPYYGPDYW

SEQ ID NO: 2008 - protein, 19 aa, Artificial Sequence
  Synthesized molecular recognition unit - heavy CDR3
CNADGYSWDGRSGRRLELW

SEQ ID NO: 2009 - protein, 17 aa, Artificial Sequence
  Synthesized molecular recognition unit - heavy CDR3
CNADIKTTTYSPLRNYW

SEQ ID NO: 2010 - protein, 12 aa, Artificial Sequence
  Synthesized molecular recognition unit - heavy CDR3
CNAETYSGNTIW

SEQ ID NO: 2011 - protein, 16 aa, Artificial Sequence
  Synthesized molecular recognition unit - heavy CDR3
CNAFVRSDFDRYYDYW

SEQ ID NO: 2012 - protein, 14 aa, Artificial Sequence
  Synthesized molecular recognition unit - heavy CDR3
CNAKRPWGSRDEYW

SEQ ID NO: 2013 - protein, 14 aa, Artificial Sequence
  Synthesized molecular recognition unit - heavy CDR3
CNAKRPWGSRDEYW

SEQ ID NO: 2014 - protein, 14 aa, Artificial Sequence
  Synthesized molecular recognition unit - heavy CDR3
CNAKRPWGSRDEYW

SEQ ID NO: 2015 - protein, 14 aa, Artificial Sequence
  Synthesized molecular recognition unit - heavy CDR3
CNAKRPWGSRDEYW

SEQ ID NO: 2016 - protein, 14 aa, Artificial Sequence
  Synthesized molecular recognition unit - heavy CDR3
CNAKRPWGTRDEYW

SEQ ID NO: 2017 - protein, 14 aa, Artificial Sequence
  Synthesized molecular recognition unit - heavy CDR3
CNAKRPWGTRDEYW

SEQ ID NO: 2018 - protein, 14 aa, Artificial Sequence
  Synthesized molecular recognition unit - heavy CDR3
CNAKRPWGTRDEYW

SEQ ID NO: 2019 - protein, 11 aa, Artificial Sequence
  Synthesized molecular recognition unit - heavy CDR3
CNANYRGNRYW

SEQ ID NO: 2020 - protein, 13 aa, Artificial Sequence
  Synthesized molecular recognition unit - heavy CDR3
CNAPAWLYDDDYW

SEQ ID NO: 2021 - protein, 12 aa, Artificial Sequence
  Synthesized molecular recognition unit - heavy CDR3
CNAVTFGGNTIR

SEQ ID NO: 2022 - protein, 9 aa, Artificial Sequence
  Synthesized molecular recognition unit - heavy CDR3
CNAVTYDGY

SEQ ID NO: 2023 - protein, 12 aa, Artificial Sequence
  Synthesized molecular recognition unit - heavy CDR3
CNAVTYNGYTIR

SEQ ID NO: 2024 - protein, 16 aa, Artificial Sequence
  Synthesized molecular recognition unit - heavy CDR3
CNAVVVGLSRRIDNIW

SEQ ID NO: 2025 - protein, 10 aa, Artificial Sequence
  Synthesized molecular recognition unit - heavy CDR3
CNKVNAITKL

SEQ ID NO: 2026 - protein, 14 aa, Artificial Sequence
  Synthesized molecular recognition unit - heavy CDR3
CNLREWNNSGAGYW

SEQ ID NO: 2027 - protein, 11 aa, Artificial Sequence
  Synthesized molecular recognition unit - heavy CDR3
CNTSPYMHDVW

SEQ ID NO: 2028 - protein, 11 aa, Artificial Sequence
  Synthesized molecular recognition unit - heavy CDR3
CNTSPYMHDVW

SEQ ID NO: 2029 - protein, 10 aa, Artificial Sequence
  Synthesized molecular recognition unit - heavy CDR3
CNTVRPLWAW

SEQ ID NO: 2030 - protein, 16 aa, Artificial Sequence
  Synthesized molecular recognition unit - heavy CDR3
CNTYPFPIYKKGYPFW

SEQ ID NO: 2031 - protein, 15 aa, Artificial Sequence
  Synthesized molecular recognition unit - heavy CDR3
CNVDRTLYGKYKEYW

SEQ ID NO: 2032 - protein, 16 aa, Artificial Sequence
  Synthesized molecular recognition unit - heavy CDR3
CSKGGVYGGTYVPDSW

SEQ ID NO: 2033 - protein, 16 aa, Artificial Sequence
  Synthesized molecular recognition unit - heavy CDR3
CSKGGVYGGTYVPDSW

SEQ ID NO: 2034 - protein, 7 aa, Artificial Sequence
  Synthesized molecular recognition unit - heavy CDR3
CSSRGYW

SEQ ID NO: 2035 - protein, 7 aa, Artificial Sequence
  Synthesized molecular recognition unit - heavy CDR3
CSSRGYW

SEQ ID NO: 2036 - protein, 21 aa, Artificial Sequence
  Synthesized molecular recognition unit - heavy CDR3
CTAGRSRYLYGSSLNGPYDYW

SEQ ID NO: 2037 - protein, 7 aa, Artificial Sequence
  Synthesized molecular recognition unit - heavy CDR3
CTKGGIQ

SEQ ID NO: 2038 - protein, 11 aa, Artificial Sequence
  Synthesized molecular recognition unit - heavy CDR3
CTLVNEIKTWW

SEQ ID NO: 2039 - protein, 11 aa, Artificial Sequence
  Synthesized molecular recognition unit - heavy CDR3
CTLVNEIKTWW

SEQ ID NO: 2040 - protein, 11 aa, Artificial Sequence
  Synthesized molecular recognition unit - heavy CDR3
CTLVNEIKTWW

SEQ ID NO: 2041 - protein, 11 aa, Artificial Sequence
  Synthesized molecular recognition unit - heavy CDR3
CTLVNEIKTWW

SEQ ID NO: 2042 - protein, 15 aa, Artificial Sequence
  Synthesized molecular recognition unit - heavy CDR3
CTREHSYYYYGMDVW

SEQ ID NO: 2043 - protein, 11 aa, Artificial Sequence
  Synthesized molecular recognition unit - heavy CDR3
CTRVAWGLDYW

SEQ ID NO: 2044 - protein, 23 aa, Artificial Sequence
  Synthesized molecular recognition unit - heavy CDR3
CTTAGYKAARRSVYPRIFNFDYW

SEQ ID NO: 2045 - protein, 15 aa, Artificial Sequence
  Synthesized molecular recognition unit - heavy CDR3
CTTDDYGDLTHLDYW

SEQ ID NO: 2046 - protein, 15 aa, Artificial Sequence
  Synthesized molecular recognition unit - heavy CDR3
CTTDDYGDQYGMDVW

SEQ ID NO: 2047 - protein, 9 aa, Artificial Sequence
  Synthesized molecular recognition unit - heavy CDR3
CTTDLWDYW

SEQ ID NO: 2048 - protein, 9 aa, Artificial Sequence
  Synthesized molecular recognition unit - heavy CDR3
CTTDLWDYW

SEQ ID NO: 2049 - protein, 17 aa, Artificial Sequence
  Synthesized molecular recognition unit - heavy CDR3
CVKDGGSFPLAYAFDIW

SEQ ID NO: 2050 - protein, 17 aa, Artificial Sequence
  Synthesized molecular recognition unit - heavy CDR3
CVKDGGSFPLAYAFDIW

SEQ ID NO: 2051 - protein, 17 aa, Artificial Sequence
  Synthesized molecular recognition unit - heavy CDR3
CVKDGGSFPLAYAFDIW

SEQ ID NO: 2052 - protein, 18 aa, Artificial Sequence
  Synthesized molecular recognition unit - heavy CDR3
CVRGDSGWGILYYVMDVW

SEQ ID NO: 2053 - protein, 12 aa, Artificial Sequence
  Synthesized molecular recognition unit - heavy CDR3
CVRYAWPEFDHW

SEQ ID NO: 2054 - protein, 12 aa, Artificial Sequence
  Synthesized molecular recognition unit - heavy CDR3
CVRYAWPEFDHW

SEQ ID NO: 2055 - protein, 12 aa, Artificial Sequence
  Synthesized molecular recognition unit - heavy CDR3
CVRYAWPEFDHW

SEQ ID NO: 2056 - protein, 10 aa, Artificial Sequence
  Synthesized molecular recognition unit - heavy CDR3
CVYGRDFDYW

SEQ ID NO: 2057 - protein, 17 aa, Artificial Sequence
  Synthesized molecular recognition unit - heavy CDR3
CYADSRSSWYDEYLEHW

SEQ ID NO: 2058 - protein, 17 aa, Artificial Sequence
  Synthesized molecular recognition unit - heavy CDR3
CYADSRSSWYDEYLEHW

SEQ ID NO: 2059 - protein, 16 aa, Artificial Sequence
  Synthesized molecular recognition unit - heavy CDR3
CYANIYYTRRAPEEYW

SEQ ID NO: 2060 - protein, 15 aa, Artificial Sequence
  Synthesized molecular recognition unit - heavy CDR3
CYARTQRMGVVNSYW

SEQ ID NO: 2061 - protein, 17 aa, Artificial Sequence
  Synthesized molecular recognition unit - heavy CDR3
CYARTVIGGFGAFRAHW

SEQ ID NO: 2062 - protein, 17 aa, Artificial Sequence
  Synthesized molecular recognition unit - heavy CDR3
CYARTVIGGFGAFRAHW

SEQ ID NO: 2063 - protein, 17 aa, Artificial Sequence
  Synthesized molecular recognition unit - heavy CDR3
CYARTVIGGFGAFRAHW

SEQ ID NO: 2064 - protein, 18 aa, Artificial Sequence
  Synthesized molecular recognition unit - heavy CDR3
CYRRQWASSWGARNYEYW

SEQ ID NO: 2065 - protein, 13 aa, Artificial Sequence
  Synthesized molecular recognition unit - heavy CDR3
CYVKLRDDDYVYR

SEQ ID NO: 2066 - protein, 12 aa, Artificial Sequence
  Synthesized molecular recognition unit - light CDR1
GASQSVPRNSLA

SEQ ID NO: 2067 - protein, 11 aa, Artificial Sequence
  Synthesized molecular recognition unit - light CDR1
HGSQDISNYLN

SEQ ID NO: 2068 - skipped

SEQ ID NO: 2069 - protein, 17 aa, Artificial Sequence
  Synthesized molecular recognition unit - light CDR1
KSSHSLLSTSTNRNHLA

SEQ ID NO: 2070 - protein, 17 aa, Artificial Sequence
  Synthesized molecular recognition unit - light CDR1
KSSHSLLSTSTNRNQLA

SEQ ID NO: 2071 - protein, 17 aa, Artificial Sequence
  Synthesized molecular recognition unit - light CDR1
KSSHSLLYSSDNKNYLA

SEQ ID NO: 2072 - protein, 17 aa, Artificial Sequence
  Synthesized molecular recognition unit - light CDR1
KSSQSILSSSSNRDSLA

SEQ ID NO: 2073 - protein, 17 aa, Artificial Sequence
  Synthesized molecular recognition unit - light CDR1
KSSQSVLYTTTNRNHIA

SEQ ID NO: 2074 - protein, 17 aa, Artificial Sequence
  Synthesized molecular recognition unit - light CDR1
KSSQSVLYTTTNRNHIA

SEQ ID NO: 2075 - protein, 11 aa, Artificial Sequence
  Synthesized molecular recognition unit - light CDR1
QASQDIANYLN

SEQ ID NO: 2076 - protein, 11 aa, Artificial Sequence
  Synthesized molecular recognition unit - light CDR1
QASQDISNYLA

SEQ ID NO: 2077 - protein, 11 aa, Artificial Sequence
  Synthesized molecular recognition unit - light CDR1
QASQDISNYLN

SEQ ID NO: 2078 - protein, 11 aa, Artificial Sequence
  Synthesized molecular recognition unit - light CDR1
QASQGITNYLN

SEQ ID NO: 2079 - protein, 11 aa, Artificial Sequence
  Synthesized molecular recognition unit - light CDR1
RASQDISNYLN

SEQ ID NO: 2080 - protein, 11 aa, Artificial Sequence
  Synthesized molecular recognition unit - light CDR1
RASQDISSYLA

SEQ ID NO: 2081 - protein, 11 aa, Artificial Sequence
  Synthesized molecular recognition unit - light CDR1
RASQGINSYLA

SEQ ID NO: 2082 - protein, 11 aa, Artificial Sequence
  Synthesized molecular recognition unit - light CDR1
RASQGISNNLN

SEQ ID NO: 2083 - protein, 11 aa, Artificial Sequence
  Synthesized molecular recognition unit - light CDR1
RASQGISNYLA

SEQ ID NO: 2084 - protein, 11 aa, Artificial Sequence
  Synthesized molecular recognition unit - light CDR1
RASQGISNYLN

SEQ ID NO: 2085 - protein, 11 aa, Artificial Sequence
  Synthesized molecular recognition unit - light CDR1
RASQGISRDLA

SEQ ID NO: 2086 - protein, 11 aa, Artificial Sequence
  Synthesized molecular recognition unit - light CDR1
RASQGISSALA

SEQ ID NO: 2087 - protein, 11 aa, Artificial Sequence
  Synthesized molecular recognition unit - light CDR1
RASQGISSYLA

SEQ ID NO: 2088 - protein, 11 aa, Artificial Sequence
  Synthesized molecular recognition unit - light CDR1
RASQNIGLYLN

SEQ ID NO: 2089 - protein, 11 aa, Artificial Sequence
  Synthesized molecular recognition unit - light CDR1
RASQRVSNYLN

SEQ ID NO: 2090 - protein, 11 aa, Artificial Sequence
  Synthesized molecular recognition unit - light CDR1
RASQSISNYLN

SEQ ID NO: 2091 - protein, 11 aa, Artificial Sequence
  Synthesized molecular recognition unit - light CDR1
RASQSISRWLA

SEQ ID NO: 2092 - protein, 11 aa, Artificial Sequence
  Synthesized molecular recognition unit - light CDR1
RASQSISRYLN

SEQ ID NO: 2093 - protein, 11 aa, Artificial Sequence
  Synthesized molecular recognition unit - light CDR1
RASQSISSYLA

SEQ ID NO: 2094 - protein, 11 aa, Artificial Sequence
  Synthesized molecular recognition unit - light CDR1
RASQSISSYLN

SEQ ID NO: 2095 - protein, 11 aa, Artificial Sequence
  Synthesized molecular recognition unit - light CDR1
RASQSIZNYLN

SEQ ID NO: 2096 - protein, 12 aa, Artificial Sequence
  Synthesized molecular recognition unit - light CDR1
RASQSVRSSDLA

SEQ ID NO: 2097 - protein, 11 aa, Artificial Sequence
  Synthesized molecular recognition unit - light CDR1
RASQSVYSNLA

SEQ ID NO: 2098 - protein, 11 aa, Artificial Sequence
  Synthesized molecular recognition unit - light CDR1
RASQYISNYLN

SEQ ID NO: 2099 - protein, 11 aa, Artificial Sequence
  Synthesized molecular recognition unit - light CDR1
RASRNINRYLN

SEQ ID NO: 2100 - protein, 11 aa, Artificial Sequence
  Synthesized molecular recognition unit - light CDR1
RPSQSIGSWLA

SEQ ID NO: 2101 - protein, 16 aa, Artificial Sequence
  Synthesized molecular recognition unit - light CDR1
RSSQSLLHSDGYTYLY

SEQ ID NO: 2102 - protein, 16 aa, Artificial Sequence
  Synthesized molecular recognition unit - light CDR1
RSSQSLLHSNGYNYLD

SEQ ID NO: 2103 - protein, 11 aa, Artificial Sequence
  Synthesized molecular recognition unit - light CDR1
RVSQSISSYLN

SEQ ID NO: 2104 - protein, 11 aa, Artificial Sequence
  Synthesized molecular recognition unit - light CDR1
RZSQSZSZYLN

SEQ ID NO: 2105 - protein, 13 aa, Artificial Sequence
  Synthesized molecular recognition unit - light CDR1
SGSSSNVGNNYVS

SEQ ID NO: 2106 - protein, 12 aa, Artificial Sequence
  Synthesized molecular recognition unit - light CDR1
WASQSVRGNYVA

SEQ ID NO: 2107 - protein, 7 aa, Artificial Sequence
  Synthesized molecular recognition unit - light CDR2
AASILQS

SEQ ID NO: 2108 - protein, 7 aa, Artificial Sequence
  Synthesized molecular recognition unit - light CDR2
AASSLHS

SEQ ID NO: 2109 - protein, 7 aa, Artificial Sequence
  Synthesized molecular recognition unit - light CDR2
AASSLLS

SEQ ID NO: 2110 - protein, 7 aa, Artificial Sequence
  Synthesized molecular recognition unit - light CDR2
AASSLQS

SEQ ID NO: 2111 - protein, 7 aa, Artificial Sequence
  Synthesized molecular recognition unit - light CDR2
AASTLES

SEQ ID NO: 2112 - protein, 7 aa, Artificial Sequence
  Synthesized molecular recognition unit - light CDR2
AASTLQR

SEQ ID NO: 2113 - protein, 7 aa, Artificial Sequence
  Synthesized molecular recognition unit - light CDR2
AASTLQS

SEQ ID NO: 2114 - protein, 7 aa, Artificial Sequence
  Synthesized molecular recognition unit - light CDR2
DAKGLHP

SEQ ID NO: 2115 - protein, 7 aa, Artificial Sequence
  Synthesized molecular recognition unit - light CDR2
DASNLET

SEQ ID NO: 2116 - protein, 7 aa, Artificial Sequence
  Synthesized molecular recognition unit - light CDR2
DASNLQS

SEQ ID NO: 2117 - protein, 7 aa, Artificial Sequence
  Synthesized molecular recognition unit - light CDR2
DASNRAA

SEQ ID NO: 2118 - protein, 7 aa, Artificial Sequence
  Synthesized molecular recognition unit - light CDR2
DASNRAG

SEQ ID NO: 2119 - protein, 7 aa, Artificial Sequence
  Synthesized molecular recognition unit - light CDR2
DASNRQS

SEQ ID NO: 2120 - protein, 7 aa, Artificial Sequence
  Synthesized molecular recognition unit - light CDR2
DASSLES

SEQ ID NO: 2121 - protein, 7 aa, Artificial Sequence
  Synthesized molecular recognition unit - light CDR2
DASSLQR

SEQ ID NO: 2122 - protein, 7 aa, Artificial Sequence
  Synthesized molecular recognition unit - light CDR2
DNDKRPS

SEQ ID NO: 2123 - protein, 7 aa, Artificial Sequence
  Synthesized molecular recognition unit - light CDR2
DTSNRAT

SEQ ID NO: 2124 - protein, 7 aa, Artificial Sequence
  Synthesized molecular recognition unit - light CDR2
GASQRAT

SEQ ID NO: 2125 - protein, 7 aa, Artificial Sequence
  Synthesized molecular recognition unit - light CDR2
GASTRAT

SEQ ID NO: 2126 - protein, 7 aa, Artificial Sequence
  Synthesized molecular recognition unit - light CDR2
GSSSRAT

SEQ ID NO: 2127 - protein, 7 aa, Artificial Sequence
  Synthesized molecular recognition unit - light CDR2
GSSTLQS

SEQ ID NO: 2128 - protein, 7 aa, Artificial Sequence
  Synthesized molecular recognition unit - light CDR2
GTSNLQS

SEQ ID NO: 2129 - protein, 7 aa, Artificial Sequence
  Synthesized molecular recognition unit - light CDR2
GTSSLHT

SEQ ID NO: 2130 - protein, 7 aa, Artificial Sequence
  Synthesized molecular recognition unit - light CDR2
KASSLES

SEQ ID NO: 2131 - protein, 7 aa, Artificial Sequence
  Synthesized molecular recognition unit - light CDR2
LGSNRAS

SEQ ID NO: 2132 - protein, 7 aa, Artificial Sequence
  Synthesized molecular recognition unit - light CDR2
SASSLQS

SEQ ID NO: 2133 - protein, 7 aa, Artificial Sequence
  Synthesized molecular recognition unit - light CDR2
SASTLQS

SEQ ID NO: 2134 - protein, 7 aa, Artificial Sequence
  Synthesized molecular recognition unit - light CDR2
TLSYRAS

SEQ ID NO: 2135 - protein, 7 aa, Artificial Sequence
  Synthesized molecular recognition unit - light CDR2
WASSRKS

SEQ ID NO: 2136 - protein, 7 aa, Artificial Sequence
  Synthesized molecular recognition unit - light CDR2
WSSTRES

SEQ ID NO: 2137 - protein, 7 aa, Artificial Sequence
  Synthesized molecular recognition unit - light CDR2
ZASSLQS

SEQ ID NO: 2138 - protein, 7 aa, Artificial Sequence
  Synthesized molecular recognition unit - light CDR2
ZASTLES

SEQ ID NO: 2139 - protein, 13 aa, Artificial Sequence
  Synthesized molecular recognition unit - light CDR3
CESWDSSLSSEVF

SEQ ID NO: 2140 - protein, 11 aa, Artificial Sequence
  Synthesized molecular recognition unit - light CDR3
CLQDFSFPWTF

SEQ ID NO: 2141 - protein, 11 aa, Artificial Sequence [sequence omitted]

SEQ ID NO: 2142 - protein, 11 aa, Artificial Sequence
  Synthesized molecular recognition unit - light CDR3
CLQDYTDPFTF

SEQ ID NO: 2143 - protein, 11 aa, Artificial Sequence [sequence omitted]

SEQ ID NO: 2144 - protein, 11 aa, Artificial Sequence
  Synthesized molecular recognition unit - light CDR3
CMQALEALFTF

SEQ ID NO: 2145 - protein, 11 aa, Artificial Sequence [sequence omitted]

SEQ ID NO: 2146 - protein, 11 aa, Artificial Sequence [sequence omitted]

SEQ ID NO: 2147 - protein, 11 aa, Artificial Sequence [sequence omitted]

SEQ ID NO: 2148 - protein, 11 aa, Artificial Sequence [sequence omitted]

SEQ ID NO: 2149 - protein, 10 aa, Artificial Sequence [sequence omitted]

SEQ ID NO: 2150 - protein, 11 aa, Artificial Sequence
  Synthesized molecular recognition unit - light CDR3
CQQAYSFPWTF

SEQ ID NO: 2151 - protein, 11 aa, Artificial Sequence
  Synthesized molecular recognition unit - light CDR3
CQQFDRSPLTF

SEQ ID NO: 2152 - protein, 11 aa, Artificial Sequence [sequence omitted]

SEQ ID NO: 2153 - protein, 11 aa, Artificial Sequence
  Synthesized molecular recognition unit - light CDR3
CQQGYGTPPMF

SEQ ID NO: 2154 - protein, 11 aa, Artificial Sequence
  Synthesized molecular recognition unit - light CDR3
CQQGYNTPRTF

SEQ ID NO: 2155 - protein, 11 aa, Artificial Sequence
  Synthesized molecular recognition unit - light CDR3
CQQIHSYPLTF

SEQ ID NO: 2156 - protein, 11 aa, Artificial Sequence [sequence omitted]

SEQ ID NO: 2157 - protein, 11 aa, Artificial Sequence [sequence omitted]

SEQ ID NO: 2158 - protein, 11 aa, Artificial Sequence [sequence omitted]

SEQ ID NO: 2159 - protein, 11 aa, Artificial Sequence [sequence omitted]

SEQ ID NO: 2160 - protein, 11 aa, Artificial Sequence [sequence omitted]

SEQ ID NO: 2161 - protein, 11 aa, Artificial Sequence [sequence omitted]

SEQ ID NO: 2162 - protein, 11 aa, Artificial Sequence [sequence omitted]

SEQ ID NO: 2163 - protein, 11 aa, Artificial Sequence
  Synthesized molecular recognition unit - light CDR3
CQQSYRIHWTF

SEQ ID NO: 2164 - protein, 11 aa, Artificial Sequence [sequence omitted]

SEQ ID NO: 2165 - protein, 10 aa, Artificial Sequence
  Synthesized molecular recognition unit - light CDR3
CQQSYRYPTF

SEQ ID NO: 2166 - protein, 11 aa, Artificial Sequence [sequence omitted]

SEQ ID NO: 2167 - protein, 11 aa, Artificial Sequence [sequence omitted]

SEQ ID NO: 2168 - protein, 12 aa, Artificial Sequence
  Synthesized molecular recognition unit - light CDR3
CQQSYSFPPFTF

SEQ ID NO: 2169 - protein, 11 aa, Artificial Sequence [sequence omitted]

SEQ ID NO: 2170 - protein, 11 aa, Artificial Sequence [sequence omitted]

SEQ ID NO: 2171 - protein, 11 aa, Artificial Sequence [sequence omitted]

SEQ ID NO: 2172 - protein, 11 aa, Artificial Sequence [sequence omitted]

SEQ ID NO: 2173 - protein, 11 aa, Artificial Sequence [sequence omitted]

SEQ ID NO: 2174 - protein, 11 aa, Artificial Sequence [sequence omitted]

SEQ ID NO: 2175 - protein, 11 aa, Artificial Sequence [sequence omitted]

SEQ ID NO: 2176 - protein, 11 aa, Artificial Sequence [sequence omitted]

SEQ ID NO: 2177 - protein, 11 aa, Artificial Sequence [sequence omitted]

SEQ ID NO: 2178 - protein, 11 aa, Artificial Sequence [sequence omitted]

SEQ ID NO: 2179 - protein, 11 aa, Artificial Sequence
  Synthesized molecular recognition unit - light CDR3
CQQSYTSRLTF

SEQ ID NO: 2180 - protein, 11 aa, Artificial Sequence [sequence omitted]

SEQ ID NO: 2181 - protein, 11 aa, Artificial Sequence [sequence omitted]

SEQ ID NO: 2182 - protein, 11 aa, Artificial Sequence
  Synthesized molecular recognition unit - light CDR3
CQQTYTIPFTF

SEQ ID NO: 2183 - protein, 12 aa, Artificial Sequence [sequence omitted]

SEQ ID NO: 2184 - protein, 13 aa, Artificial Sequence
  Synthesized molecular recognition unit - light CDR3
CQQYHNWPPEYTF

SEQ ID NO: 2185 - protein, 12 aa, Artificial Sequence [sequence omitted]

SEQ ID NO: 2186 - protein, 11 aa, Artificial Sequence [sequence omitted]

SEQ ID NO: 2187 - protein, 11 aa, Artificial Sequence [sequence omitted]

SEQ ID NO: 2188 - protein, 11 aa, Artificial Sequence [sequence omitted]

SEQ ID NO: 2189 - protein, 11 aa, Artificial Sequence [sequence omitted]

SEQ ID NO: 2190 - protein, 5 aa, Artificial Sequence
  Synthesized molecular recognition unit - heavy CDR1
TYAMH

SEQ ID NO: 2191 - protein, 5 aa, Artificial Sequence
  Synthesized molecular recognition unit - heavy CDR1
SYAMS

SEQ ID NO: 2192 - protein, 10 aa, Artificial Sequence
  Synthesized molecular recognition unit - Heavy CDR1
GFTFSHYTLS

SEQ ID NO: 2193 - protein, 19 aa, Artificial Sequence
  Synthesized molecular recognition unit - heavy CDR2
RIRSKSNNYAKNYDDSVKD

SEQ ID NO: 2194 - protein, 17 aa, Artificial Sequence
  Synthesized molecular recognition unit - heavy CDR2
TISDGGSYTRYPDKLKG

SEQ ID NO: 2195 - protein, 17 aa, Artificial Sequence
  Synthesized molecular recognition unit - Heavy CDR2
VISGDGSYTYYADSVKG

SEQ ID NO: 2196 - protein, 9 aa, Artificial Sequence
  Synthesized molecular recognition unit - heavy CDR3
ENYGGRFDY

SEQ ID NO: 2197 - protein, 10 aa, Artificial Sequence
  Synthesized molecular recognition unit - heavy CDR3
VGGRRDYFDY

SEQ ID NO: 2198 - protein, 9 aa, Artificial Sequence
  Synthesized molecular recognition unit - Heavy CDR3
NFIKYVFAN

SEQ ID NO: 2199 - protein, 11 aa, Artificial Sequence
  Synthesized molecular recognition unit - light CDR1
KASENVLNYVS

SEQ ID NO: 2200 - protein, 18 aa, Artificial Sequence
  Synthesized molecular recognition unit - light CDR1
KSSQSLLYSSNQKNYLAW

SEQ ID NO: 2201 - protein, 11 aa, Artificial Sequence
  Synthesized molecular recognition unit - light CDR1
SGDNIGSFYVH

SEQ ID NO: 2202 - protein, 7 aa, Artificial Sequence
  Synthesized molecular recognition unit - light CDR2
GASNRYT

SEQ ID NO: 2203 - protein, 7 aa, Artificial Sequence
  Synthesized molecular recognition unit - light CDR2
WASTRES

SEQ ID NO: 2204 - protein, 8 aa, Artificial Sequence
  Synthesized molecular recognition unit - light CDR2
DKSNRPSG

SEQ ID NO: 2205 - protein, 7 aa, Artificial Sequence
  Synthesized molecular recognition unit - light CDR3
GQSYRYP

SEQ ID NO: 2206 - protein, 6 aa, Artificial Sequence
  Synthesized molecular recognition unit - light CDR3
QQYYSY

SEQ ID NO: 2207 - protein, 9 aa, Artificial Sequence
  Synthesized molecular recognition unit - light CDR3
QSYANTLSL

SEQ ID NO: 2208 - protein, 7 aa, Artificial Sequence
  Synthesized molecular recognition unit - heavy CDR1
GFSFSTS

SEQ ID NO: 2209 - protein, 7 aa, Artificial Sequence
  Synthesized molecular recognition unit - heavy CDR1
GYTFTTY

SEQ ID NO: 2210 - protein, 7 aa, Artificial Sequence
  Synthesized molecular recognition unit - Heavy CDR1
GFTFTSY

SEQ ID NO: 2211 - protein, 6 aa, Artificial Sequence
  Synthesized molecular recognition unit - heavy CDR2
NLNGGS

SEQ ID NO: 2212 - protein, 7 aa, Artificial Sequence
  Synthesized molecular recognition unit - heavy CDR2
FPGNVNT

SEQ ID NO: 2213 - protein, 6 aa, Artificial Sequence
  Synthesized molecular recognition unit - Heavy CDR2
SPYSGS

SEQ ID NO: 2214 - protein, 11 aa, Artificial Sequence
  Synthesized molecular recognition unit - heavy CDR3
ELAGYGTPFAY

SEQ ID NO: 2215 - protein, 9 aa, Artificial Sequence
  Synthesized molecular recognition unit - heavy CDR3
EELQYYFDY

SEQ ID NO: 2216 - protein, 17 aa, Artificial Sequence
  Synthesized molecular recognition unit - Heavy CDR3
RARPPIRLHPRGSVMDY

SEQ ID NO: 2217 - protein, 11 aa, Artificial Sequence
  Synthesized molecular recognition unit - light CDR1
KASQSISYNLH

SEQ ID NO: 2218 - protein, 10 aa, Artificial Sequence
  Synthesized molecular recognition unit - light CDR1
SANSSVRFMF

SEQ ID NO: 2219 - protein, 11 aa, Artificial Sequence
  Synthesized molecular recognition unit - light CDR1
RASQDVSTAVA

SEQ ID NO: 2220 - protein, 7 aa, Artificial Sequence
  Synthesized molecular recognition unit - light CDR2
YTSQSIS

SEQ ID NO: 2221 - protein, 7 aa, Artificial Sequence
  Synthesized molecular recognition unit - light CDR2
RTSNLAS

SEQ ID NO: 2222 - protein, 7 aa, Artificial Sequence
  Synthesized molecular recognition unit - light CDR2
SASFLYS

SEQ ID NO: 2223 - protein, 9 aa, Artificial Sequence
  Synthesized molecular recognition unit - light CDR3
QQSNSWPLT

SEQ ID NO: 2224 - protein, 9 aa, Artificial Sequence
  Synthesized molecular recognition unit - light CDR3
QQYHSYPWT

SEQ ID NO: 2225 - protein, 9 aa, Artificial Sequence
  Synthesized molecular recognition unit - light CDR3
QQSYTTPPT

SEQ ID NO: 2226-2233 - skipped (8 entries)

SEQ ID NO: 2234 - protein, 22 aa, Artificial Sequence
  Made in Lab - Signal peptide WNT surrogate component
MDMRVPAQLLGLLLLWLRGARC

SEQ ID NO: 2235 - protein, 240 aa, Artificial Sequence
  Made in Lab - antiFZD_scFv, WNT surrogate component
EVQLVESGGGLVQPGGSLRLSCAASGFTFSHYTLSWVRQAPGKGLEWVSVISGDGSYTYYADSVKGRFTISSDNSKNTLYLQMNSLRAEDTAVYYCARNFIKYVFANWGQGTLVTVSSGGGGSGGGGSGGGGSDIELTQPPSVSVAPGQTARISCSGDNIGSFYVHWYQQKPGQAPVLVIYDKSNRPSGIPERFSGSNSGNTATLTISGTQAEDEADYYCQSYANTLSLVFGGGTKLTVL

SEQ ID NO: 2236 - protein, 241 aa, Artificial Sequence
  Made in Lab - antiFZD_scFv, WNT surrogate component
EVQLVESGGGLVQPGGSLRLSCAASGFNISSSYIHWVRQAPGKGLEWVAYIYSSYGSTYYADSVKGRFTISADTSKNTAYLQMNSLRAEDTAVYYCARASWYALDYWGQGTLVTVSSGSAASGSSGGSSSGADIQMTQSPSSLSASVGDRVTITCRASQSVSSAVAWYQQKPGKAPKLLIYSASSLYSGVPSRFSGSRSGTDFTLTISSLQPEDFATYYCQQYWYGVAPITFGQGTKVEIK

SEQ ID NO: 2237 - protein, 239 aa, Artificial Sequence
  Made in Lab - antiFZD_scFv, WNT surrogate component
EVQLVESGGGLVQPGGSLRLSCAASGFNISYSYIHWVRQAPGKGLEWVASIYSSSGSTSYADSVKGRFTISADTSKNTAYLQMNSLRAEDTAVYYCARGAIDYWGQGTLVTVSSGGGGSGGGGSGGGGSDIQMTQSPSSLSASVGDRVTITCRASQSVSSAVAWYQQKPGKAPKLLIYSASSLYSGVPSRFSGSRSGTDFTLTISSLQPEDFATYYCQQWYSSGHVLITFGQGTKVEIK

SEQ ID NO: 2238 - protein, 242 aa, Artificial Sequence
  Made in Lab - antiLRP_scFv, WNT surrogate component
DVKLVESGGGLVKLGGSLRLSCAASGFSFSTSYMSWVRQTPEKRLELVAAINLNGGSTYYSDTVKGRFTISRDNAKNTLYLQMSSLKSEDTAFYYCASELAGYGTPFAYWGQGTLVTVSAGSAASGSSGGSSSGADIVLTQSPATLSVTPGDSVSLSCKASQSISYNLHWYQQKSHESPRLLIKYTSQSISGIPSRFSGSGSGTDFTLTINNVETEDFGMYFCQQSNSWPLTFGAGTKLEVK

SEQ ID NO: 2239 - protein, 248 aa, Artificial Sequence
  Made in Lab - antiLRP_scFv, WNT surrogate component
EVQLVESGGGLVQPGGSLRLSCAASGFTFTSYYISWVRQAPGKGLEWVAEISPYSGSTYYADSVKGRFTISADTSKNTAYLQMNSLRAEDTAVYYCALRARPPIRLHPRGSVMDYWGQGTLVTVSSGSAASGSSGGSSSGADIQMTQSPSSLSASVGDRVTITCRASQDVSTAVAWYQQKPGKAPKLLIYSASFLYSGVPSRFSGSGSGTDFTLTISSLQPEDFATYYCQQSYTTPPTFGQGTKVEIK

SEQ ID NO: 2240 - protein, 240 aa, Artificial Sequence
  Made in Lab - antiGFP scFv construct
QVQLVESGGGLVQPGGSLRLSCAASGFTFSRYGMHWVRQAPGKGLEWVSGISSIGSNTYYADSVKGRFTISRDNSKNTLYLQMNSLRAEDTAVYYCARWYKTYIDVWGQGTLVTVSSGGGGSGGGGSGGGGSDIELTQPPSVSVAPGQTARISCSGDNLGKKYVYWYQQKPGQAPVLVIYGDDERPSGIPERFSGSNSGNTATLTISGTQAEDEADYYCASYDSSHILIVFGGGTKLTVL

SEQ ID NO: 2241 - protein, 5 aa, Artificial Sequence
  Made in Lab - linker between tandem scFV, WNT surrogate component
GSGSG

SEQ ID NO: 2242 - protein, 10 aa, Artificial Sequence
  Made in Lab - linker between tandem scFV, WNT surrogate component
GSGSGGSGSG

SEQ ID NO: 2243 - protein, 15 aa, Artificial Sequence
  Made in Lab - linker between tandem scFV, WNT surrogate component
GSGSGGSGSGGSSGG

SEQ ID NO: 2244 - protein, 227 aa, Artificial Sequence
  Made in Lab - hIgG1_Fc_LALAPG, WNT surrogate component
DKTHTCPPCPAPEAAGGPSVFLFPPKPKDTLMISRTPEVTCVVVDVSHEDPEVKFNWYVDGVEVHNAKTKPREEQYNSTYRVVSVLTVLHQDWLNGKEYKCKVSNKALGAPIEKTISKAKGQPREPQVYTLPPSREEMTKNQVSLTCLVKGFYPSDIAVEWESNGQPENNYKTTPPVLDSDGSFFLYSKLTVDKSRWQQGNVFSCSVMHEALHNHYTQKSLSLSPGK

SEQ ID NO: 2245 - protein, 240 aa, Artificial Sequence
  Made in Lab - hIgG1_Fc_LALAPG, WNT surrogate component
DKTHTCPPCPAPEAAGGPSVFLFPPKPKDTLMISRTPEVTCVVVDVSHEDPEVKFNWYVDGVEVHNAKTKPREEQYNSTYRVVSVLTVLHQDWLNGKEYKCKVSNKALGAPIEKTISKAKGQPREPQVYTLPPSREEMTKNQVSLWCLVKGFYPSDIAVEWESNGQPENNYKTTPPVLDSDGSFFLYSKLTVDKSRWQQGNVFSCSVMHEALHNHYTQKSLSLSPGKGGSGGDYKDDDDK

SEQ ID NO: 2246 - protein, 238 aa, Artificial Sequence
  Made in Lab - hIgG1_Fc_LALAPG, WNT surrogate component
DKTHTCPPCPAPEAAGGPSVFLFPPKPKDTLMISRTPEVTCVVVDVSHEDPEVKFNWYVDGVEVHNAKTKPREEQYNSTYRVVSVLTVLHQDWLNGKEYKCKVSNKALGAPIEKTISKAKGQPREPQVYTLPPSREEMTKNQVSLSCAVKGFYPSDIAVEWESNGQPENNYKTTPPVLDSDGSFFLVSKLTVDKSRWQQGNVFSCSVMHEALHNHYTQKSLSLSPGKGSGSGHHHHHH

SEQ ID NO: 2247 - protein, 8 aa, Artificial Sequence
  Made in Lab - tag, WNT surrogate component
DYKDDDDK

SEQ ID NO: 2248 - protein, 6 aa, Artificial Sequence
  Made in Lab - tag, WNT surrogate component
HHHHHH

SEQ ID NO: 2249 - protein, 90 aa, Homo sapiens
KMYHTKGQEGSVCLRSSDCASGLCCARHFWSKICKPVLKEGQVCTKHRRKGSHGLEIFQRCYCGEGLSCRIQKDHHQASNSSRLHTCQRH

SEQ ID NO: 2250 - protein, 88 aa, Homo sapiens
KMSHIKGHEGDPCLRSSDCIEGFCCARHFWTKICKPVLHQGEVCTKQRKKGSHGLEIFQRCDCAKGLSCKVWKDATYSSKARLHVCQK

SEQ ID NO: 2251 - protein, 33 aa, Homo sapiens; identical to SEQ ID NO: 100

SEQ ID NO: 2252 - protein, 33 aa, Homo sapiens; identical to SEQ ID NO: 103

SEQ ID NO: 2253 - protein, 36 aa, Homo sapiens; identical to SEQ ID NO: 102

SEQ ID NO: 2254 - protein, 81 aa, Homo sapiens; identical to SEQ ID NO: 105

SEQ ID NO: 2255 - protein, 45 aa, Homo sapiens; identical to SEQ ID NO: 106

SEQ ID NO: 2256 - protein, 46 aa, Homo sapiens; identical to SEQ ID NO: 107

SEQ ID NO: 2257 - protein, 24 aa, Homo sapiens
CMEGPGDEEVPLPHKTPIQPGEEC

SEQ ID NO: 2258 - protein, 49 aa, Homo sapiens; identical to SEQ ID NO: 104

SEQ ID NO: 2259 - protein, 50 aa, Homo sapiens; identical to SEQ ID NO: 98

SEQ ID NO: 2260 - protein, 52 aa, Homo sapiens; identical to SEQ ID NO: 99

What is claimed is:

1. A multispecific Wnt surrogate molecule, wherein the Wnt surrogate molecule comprises:
(i) a plurality of regions that each specifically bind to a set of one or more Frizzled (Fzd) receptor epitopes (Fzd binding regions), wherein at least two Fzd binding regions bind to different sets of one or more Fzd receptor epitopes; and
(ii) one or more regions that specifically bind to a Low-density lipoprotein (LDL) receptor-related protein 5 (LRP5) and/or a LDL receptor-related protein 6 (LRP6) (LRP5/6 binding regions).

2. The Wnt surrogate molecule of claim 1, wherein the at least two Fzd binding regions bind to different sets of one or more Fzd receptors, different sets of one or more epitopes within the same set of one or more Fzd receptors, or a combination thereof.

3. The Wnt surrogate molecule of any one of claims 1-2, wherein each Fzd binding region binds to one or more of Frizzled 1 (Fzd1), Frizzled 2 (Fzd2), Frizzled 3 (Fzd3), Frizzled 4 (Fzd4), Frizzled 5 (Fzd5), Frizzled 6 (Fzd6), Frizzled 7 (Fzd7), Frizzled 8 (Fzd8), Frizzled 9 (Fzd9), and Frizzled 10 (Fzd10).

4. The Wnt surrogate molecule of any one of claims 1-3, wherein at least one Fzd binding region binds to: (i) Fzd1, Fzd2, Fzd7, and Fzd9; (ii) Fzd1, Fzd2, and Fzd7; (iii) Fzd5 and Fzd8; (iv) Fzd5, Fzd7, and Fzd8; (v) Fzd1, Fzd4, Fzd5, and Fzd8; (vi) Fzd1, Fzd2, Fzd5, Fzd7, and Fzd8; (vii) Fzd4 and Fzd9; (viii) Fzd9 and Fzd10; (ix) Fzd5, Fzd8, and Fzd10; (x) Fzd4, Fzd5, and Fzd8; or (xi) Fzd1, Fzd5, Fzd7 and Fzd8.

5. The Wnt surrogate molecule of any one of claims 1-4, wherein the plurality of Fzd binding regions comprises:
(i) a first Fzd binding region that binds to a first set of one or more Fzd receptors, and
(ii) a second Fzd binding region that binds to a second, different set of one or more Fzd receptors.

6. The Wnt surrogate molecule of claim 5, wherein:
(i) the first Fzd binding region binds to one or more of Fzd1, Fzd2, Fzd3, Fzd4, Fzd5, Fzd6, Fzd7, Fzd8, Fzd9, and Fzd10, and
(ii) the second Fzd binding region binds to one or more of Fzd1, Fzd2, Fzd3, Fzd4, Fzd5, Fzd6, Fzd7, Fzd8, Fzd9, and Fzd10.

7. The Wnt surrogate molecule of claim 5, wherein the first Fzd binding region binds to Fzd4 and the second Fzd binding region binds to Fzd9.

8. The Wnt surrogate molecule of any one of claims 1-7, wherein the plurality of Fzd binding regions comprises:
(i) a first Fzd binding region that binds to a first set of one or more epitopes within a set of one or more Fzd receptors, and
(ii) a second Fzd binding region that binds to a second, different set of one or more epitopes within the same set of one or more Fzd receptors.

9. The Wnt surrogate of claim 8, wherein:
a) the first Fzd binding region binds to at least one Fzd receptor that induces non-canonical Wnt signaling; and
b) the second Fzd binding region binds to at least one Fzd receptor that induces canonical Wnt signaling.

10. The Wnt surrogate of claim 9, wherein binding of the first Fzd receptor and second Fzd receptor results in:
a. canonical Wnt signaling; or
b. non-canonical Wnt signaling.

11. The Wnt surrogate molecule of any one of claims 1-10, wherein at least one Fzd binding region binds monospecifically to a single Fzd receptor.

12. The Wnt surrogate molecule of claim 11, wherein the at least one Fzd binding region binds monospecifically to Fzd1, Fzd2, Fzd3, Fzd4, Fzd5, Fzd6, Fzd7, Fzd8, Fzd9, or Fzd10.

13. The Wnt surrogate molecule of any one of claims 1-12, wherein at least one Fzd binding region binds to a region of a Fzd receptor that (i) does not include the cysteine rich domain (CRD) of the Fzd receptor or (ii) includes less than the entire CRD of the FZD receptor or (iii) overlaps with the CRD of the Fzd receptor.

14. The Wnt surrogate molecule of claim 13, wherein the at least one Fzd binding region binds to a hinge region of the Fzd receptor.

15. The Wnt surrogate molecule of claim 14, wherein the hinge region comprises an amino acid sequence having at least 90% identity to any of the sequences set forth in SEQ ID NOs:98-107.

16. The Wnt surrogate molecule of claim 13 wherein the at least one Fzd binding region binds to an N-terminal region upstream of the CRD of the Fzd receptor.

17. The Wnt surrogate molecule of claim 16, wherein the N-terminal region comprises an amino acid sequence having at least 90% identity to SEQ ID NO:108.

18. The Wnt surrogate molecule of any one of claims 1-17, wherein at least one of the Fzd binding regions comprises one or more antigen-binding fragments of an antibody.

19. The Wnt surrogate molecule of claim 18, wherein the one or more antigen-binding fragments are selected from the group consisting of: IgG, Fv, scFv, Fab, and VHH or sdAbs.

20. The Wnt surrogate molecule of any one of claims 18-19, wherein the one or more antigen-binding fragments are humanized.

21. The Wnt surrogate molecule of any one of claims 1-20, wherein at least one Fzd binding region comprises an amino acid sequence having at least 90% identity to any of the sequences set forth in Table 1A, Table 1B, or SEQ ID NOs:1-73, or an antigen-binding fragment thereof.

22. The Wnt surrogate molecule of any one of claims 1-21, wherein the one or more LRP5/6 binding regions comprises one or more antigen-binding fragments of an antibody.

23. The Wnt surrogate molecule of claim 22, wherein the one or more antigen-binding fragments are selected from the group consisting of: IgG, Fv, scFv, Fab, and VHH or sdAb.

24. The Wnt surrogate molecule of any one of claims 22-23, wherein the one or more antigen-binding fragments are humanized.

25. The Wnt surrogate molecule of any one of claims 1-24, wherein the one or more LRP5/6 binding regions comprise an amino acid sequence having at least 90% identity to any of the sequences set forth in Table 2A, Table 2B, or SEQ ID NOs:74-97, or an antigen-binding fragment thereof.

26. The Wnt surrogate molecule of any one of claims 1-25, comprising one or more LRP5/6 binding regions.

27. The Wnt surrogate molecule of any one of claims 1-26, wherein the Fzd binding regions and the LRP5/6 binding regions are in a ratio of Fzdₙ:LRP5/6ₙ (Fₙ:Lₙ), wherein F and L are integers between 1 and 9, inclusive, and n is an integer between 1 and 4 inclusive.

28. The Wnt surrogate molecule of any one of claims 1-27, wherein the Fzd binding regions and the LRP5/6 binding regions are in a ratio of Fzd:LRP5/6 selected from the group consisting of: 1:1, 2:1, 3:1, 4:1, 5:1, 6:1, 2:1 2:3, 2:5, 2:7, 7:2, 5:2, 3:2, 3:4, 3:5, 3:7, 3:8, 8:3, 7:3, 5:3, 4:3, 4:5, 4:7, 4:9, 9:4, 7:4, 5:4, 6:7, 7:6, 1:2, 1:3, 1:4, 1:5, 1:6, 2:1 (with two Fzd binders and one LRP binder), 1:2 (with one Fzd binder and two LRP binders), 2:1:1 (with two different LRP binders), 1:1:2 (with two different Fzd binders), 1:1:1 (two different Fzd binders and one LRP binder or one Fzd binder and two different LRP binders) and 1:1:1:1 (all different Fzd and LRP binders).

29. The Wnt surrogate molecule of claim 28, wherein the ratio of Fzd binding regions to LRP5/6 binding regions (Fzd:LRP5/6) comprises:
a) 2 Fzd binding regions and 2 LRP5/6 binding regions;
b) 2 Fzd binding regions and 1 LRP5/6 binding region; and
c) 1 Fzd binding region and 2 LRP5/6 binding regions.

30. The Wnt surrogate molecule of claim 28, wherein the ratio of Fzd binding regions to LRP5/6 binding regions (Fzd:LRP5/6) comprises:
a) a first Fzd binding region, a second Fzd binding region, and 1 LRP5/6 binding region; or
b) a first Fzd binding regions, a second Fzd binding regions, a first LRP5/6 binding region, and a second LRP5/6 binding region,
wherein the first Fzd and second Fzd binding regions bind to same or different Fzd receptors, or binding to the same Fzd receptor on different regions/epitope, and the first LRP5/6 and second LRP5/6 binding regions bind to different epitopes or to same or different LRP proteins.

31. The Wnt surrogate molecule of any one of claims 1-30, wherein two or more LRP binding regions comprise:
(i) a first LRP binding region that binds to a first set of one or more LRP receptors, and
(ii) a second LRP binding region that binds to a second, different set of one or more LRP receptors.

32. The Wnt surrogate molecule of any one of claims 1-31, comprising a structural format selected from the group consisting of: hetero-Ig, diabody (DART), tandem diabody (DART), diabody-Fc, Fabs-in-tandem, Fabs-in-tandem IgG (FIT-Ig), Fv-IgG, and tandem scFv.

33. The Wnt surrogate molecule of any one of claims 1-32, comprising (i) a first light chain and a first heavy chain forming a first Fzd binding region, and (ii) a second light chain and a second heavy chain forming a second Fzd binding region, wherein the first and second Fzd binding regions bind to same or different sets of one or more Fzd receptor epitopes.

34. The Wnt surrogate molecule of claim 33, comprising a first LRP5/6 binding region fused to an N-terminus of the first light chain, a C-terminus of the first light chain, an N-terminus of the first heavy chain, or a C-terminus of the first heavy chain.

35. The Wnt surrogate molecule of any one of claims 33-34, comprising a second LRP5/6 binding region fused to an N-terminus of the second light chain, a C-terminus of the second light chain, an N-terminus of the second heavy chain, or a C-terminus of the second heavy chain.

36. The Wnt surrogate molecule of any one of claims 33-35, wherein the first and second heavy chains are connected to each other.

37. The Wnt surrogate molecule of claim 36, wherein the first heavy chain comprises a first CH3 domain, the second heavy chain comprises a second CH3 domain, and the first and second CH3 domains are connected to/interact with each other.

38. The Wnt surrogate molecule of claim 37, wherein the first and second CH3 domains are connected to each other via knobs-into-holes mutations.

39. The Wnt surrogate molecule of any one of claims 33-38, wherein: (i) the first heavy chain and/or the second heavy chain comprise an amino acid sequence having at least 90% identity to any of the sequences set forth in SEQ ID NOs:110, 112, 114, 116, 118, 120, and 122, and (ii) the first light chain and/or the second light chain comprise an amino acid sequence having at least 90% identity to any of the sequences set forth in SEQ ID NOs:109, 111, 113, 115, 117, 119, and 121.

40. The Wnt surrogate molecule of claim 1, comprising one or more sequences set forth in Table 5 or Table 6A.

41. The Wnt surrogate molecule of claim 41, having a structure as set forth in Table 6B.

42. The Wnt surrogate molecule of any of claims 1-41, which modulates a Wnt signaling pathway in a cell, optionally a mammalian cell.

43. The Wnt surrogate molecule of claim 42, which increases signaling via the Wnt signaling pathway in the cell.

44. The Wnt surrogate molecule of any one of claims 42-43, wherein the Wnt signaling pathway is a canonical Wnt signaling pathway.

45. The Wnt surrogate molecule of any one of claims 42-43, wherein the Wnt signaling pathway is a non-canonical Wnt signaling pathway.

46. A pharmaceutical composition comprising a pharmaceutically acceptable excipient, diluent, or carrier, and the Wnt surrogate molecule according to any of claims 1-45.

47. A method for agonizing a Wnt signaling pathway in a cell, comprising contacting the cell with the Wnt surrogate molecule according to any of claims 1-45 or the pharmaceutical composition of claim 45, wherein the Wnt surrogate molecule is an agonist of a Wnt signaling pathway.

48. A method for treating a subject having a disease or disorder, comprising administering to the subject an effective amount of the Wnt surrogate molecule according to any of claims 1-45 or the pharmaceutical composition of claim 44, wherein the Wnt surrogate molecule is an agonist of a Wnt signaling pathway.

49. The method of claim 48, wherein the disease or disorder is associated with reduced or impaired Wnt signaling, and/or wherein the subject would benefit from increased Wnt signaling.

50. The method of any one of claims 48-49, wherein the disease or disorder is selected from the group consisting of: bone fractures, stress fractures, vertebral compression fractures, osteoporosis, osteoporotic fractures, non-union fractures, delayed union fractures, spinal fusion, pre-operative optimization for spine surgeries, osteonecrosis, osseointegration of implants or orthopedic devices, osteogenesis imperfecta, bone grafts, tendon repair, tendon-bone integration, tooth growth and regeneration, maxillofacial surgery, dental implantation, periodontal diseases, maxillofacial reconstruction, osteonecrosis of the jaw, hip or femoral head, avascular necrosis, alopecia, hearing loss, vestibular hypofunction, macular degeneration, age-related macular degeneration (AMD), vitreoretinopathy, retinopathy, diabetic retinopathy, diseases of retinal degeneration, Fuchs' dystrophy, cornea diseases, stroke, traumatic brain injury, Alzheimer's disease, multiple sclerosis, muscular dystrophy, muscle atrophy caused by sarcopenia or chachexia, diseases affecting blood brain barrier (BBB), spinal cord injuries, spinal cord diseases, oral mucositis, short bowel syndrome, inflammatory bowel diseases (IBD), metabolic syndrome, diabetes, dyslipidemia, pancreatitis, exocrine pancreatic insufficiency, wound healing, diabetic foot ulcers, pressure sores, venous leg ulcers, epidermolysis bullosa, dermal hypoplasia, myocardial infarction, coronary artery disease, heart failure, hematopoietic cell disorders, immunodeficiencies, graft versus host diseases, acute kidney injuries, chronic kidney diseases, chronic obstructive pulmonary diseases (COPD), idiopathic pulmonary fibrosis, acute liver failure of all causes, acute liver failure drug-induced, alcoholic liver diseases, chronic liver failure of all causes, cirrhosis, liver fibrosis of all causes, portal hypertension, chronic liver insufficiency of all causes, nonalcoholic steatohepatitis (NASH), nonalcoholic fatty liver disease (NAFLD) (fatty liver), alcoholic hepatitis, hepatitis C virus-induced liver diseases (HCV), hepatitis B virus-induced liver diseases (HBV), other viral hepatitis (e.g., hepatitis A virus-induced liver diseases (HAV) and hepatitis D virus-induced liver diseases (HDV)), primary biliary cirrhosis, autoimmune hepatitis, livery surgery, liver injury, liver transplantation, “small for size” syndrome in liver surgery and transplantation, congenital liver disease and disorders, any other liver disorder or defect resulting from genetic diseases, degeneration, aging, drugs, and injuries.

51. The method of any one of claims 48-49, wherein the disease or disorder is a bone disease or disorder.

52. The method of claim 51, wherein the Wnt surrogate molecule binds: (i) Fzd1, Fzd2, and Fzd7; or (ii) Fzd1, Fzd2, Fzd5, Fzd7, and Fzd8.
